(19) United States
(12) Patent Application Publication
(10) Pub. No.: US 2021/0093667 A1
(43) Pub. Date: Apr. 1, 2021

(54) CRISPR/CAS-ADENINE DEAMINASE BASED COMPOSITIONS, SYSTEMS, AND METHODS FOR TARGETED NUCLEIC ACID EDITING

(71) Applicants: THE BROAD INSTITUTE, INC., Cambridge, MA (US); MASSACHUSETTS INSTITUTE OF TECHNOLOGY, Cambridge, MA (US); PRESIDENT AND FELLOWS OF HARVARD COLLEGE, Cambridge, MA (US)

(72) Inventors: Feng Zhang, Cambridge, MA (US); Jonathan Gootenberg, Cambridge, MA (US); David Benjamin Turitz Cox, Cambridge, MA (US); Omar Abudayyeh, Cambridge, MA (US); Soumya Kannan, Cambridge, MA (US)

(73) Assignees: THE BROAD INSTITUTE, INC., Cambridge, MA (US); MASSACHUSETTS INSTITUTE OF TECHNOLOGY, Cambridge, MA (US); PRESIDENT AND FELLOWS OF HARVARD COLLEGE, Cambridge, MA (US)

(21) Appl. No.: 16/617,560

(22) PCT Filed: Jun. 26, 2018
(86) PCT No.: PCT/US2018/039616

§ 371 Date: Nov. 27, 2019

Related U.S. Application Data
(60) Provisional application No. 62/525,181, filed on Jun. 26, 2017.
(60) Provisional application No. 62/528,391, filed on Jul. 3, 2017.
(60) Provisional application No. 62/534,016, filed on Jul. 18, 2017.
(60) Provisional application No. 62/561,638, filed on Sep. 21, 2017.
(60) Provisional application No. 62/568,304, filed on Oct. 4, 2017.
(60) Provisional application No. 62/574,158, filed on Oct. 18, 2017.
(60) Provisional application No. 62/591,187, filed on Nov. 27, 2017.
(60) Provisional application No. 62/610,105, filed on Dec. 22, 2017.

(51) Int. Cl. A61K 35/17; C12N 9/78; C12N 15/82; C12N 15/10; C12N 9/22

(52) U.S. Cl. CPC A61K 35/17; C12N 9/78; C12N 15/8213; C12N 15/102; C12N 2310/3513; C12Y 305/04004; C12N 2310/3519; C12N 2310/20; C12N 9/22

(57) ABSTRACT

The invention provides for systems, methods, and compositions for targeting and editing nucleic acids. In particular, the invention provides non-naturally occurring or engineered RNA-targeting systems comprising a RNA-targeting Cas13 protein, at least one guide molecule, and at least one adenosine deaminase protein or catalytic domain thereof.

### CROSS-REFERENCE TO RELATED APPLICATIONS

[0001] This application claims the benefit of U.S. Provisional Application No. 62/525,181, filed Jun. 26, 2017, U.S. Provisional Application No. 62/528,391, filed Jul. 3, 2017, U.S. Provisional Application No. 62/534,016, filed Jul. 18, 2017, U.S. Provisional Application No. 62/561,638, filed Sep. 21, 2017, U.S. Provisional Application No. 62/568,304, filed Oct. 4, 2017, U.S. Provisional Application No. 62/574,158, filed Oct. 18, 2017, U.S. Provisional Application No. 62/591,187, filed Nov. 27, 2017, and U.S. Provisional Application No. 62/610,105, filed Dec. 22, 2017. The entire contents of the above-identified applications are hereby fully incorporated herein by reference.

### STATEMENT AS TO FEDERALLY SPONSORED RESEARCH

[0002] This invention was made with government support under grant numbers MH100706, MH110049, and HL141201 awarded by the National Institutes of Health. The government has certain rights in the invention

### REFERENCE TO DOCUMENTS CO-FILED IN COMPUTER READABLE FORMAT

[0003] An ASCII compliant text file entitled “Clin_var_pathogenic_SNPS_TC.txt” created on Jul. 3, 2017 and 891,043 bytes in size is filed herewith via EFS-WEB, the contents of which are hereby incorporated herein by reference.

### FIELD OF THE INVENTION

[0004] The present invention generally relates to systems, methods, and compositions for targeting and editing nucleic acids, in particular for programmable deamination of adenine at a target locus of interest.

### BACKGROUND

[0005] Recent advances in genome sequencing techniques and analysis methods have significantly accelerated the ability to catalog and map genetic factors associated with a diverse range of biological functions and diseases. Precise genome targeting technologies are needed to enable systematic reverse engineering of causal genetic variations by allowing selective perturbation of individual genetic elements, as well as to advance synthetic biology, biotechnological, and medical applications. Although genome-editing techniques such as designer zinc fingers, transcription activator-like effectors (TALEs), or homing meganucleases are available for producing targeted genome perturbations, there remains a need for new genome engineering technologies that employ novel strategies and molecular mechanisms and are affordable, easy to set up, scalable, and amenable to targeting multiple positions within the eukaryotic genome. This would provide a major resource for new applications in genome engineering and biotechnology.

[0006] Programmable deamination of cytosine has been reported and may be used for correction of A→G and T→C point mutations. For example, Komor et al., Nature (2016) 533:420-424 reports targeted deamination of cytosine by APOBEC1 cytidine deaminase in a non-targeted DNA stranded displaced by the binding of a Cas9-guide RNA complex to a targeted DNA strand, which results in conversion of cytosine to uracil. See also Kim et al., Nature Biotechnology (2017) 35:371-376; Shimatani et al., Nature Biotechnology (2017) doi:10.1038/nbt.3833; Zong et al., Nature Biotechnology (2017) doi:10.1038/nbt.3811; Yang Nature Communication (2016) doi:10.1038/ncomms13330.

### SUMMARY OF THE INVENTION

[0007] The present application relates to modifying a target RNA sequence of interest. Using RNA-targeting rather than DNA targeting offers several advantages relevant for therapeutic development. First, there are substantial safety benefits to targeting RNA: there will be fewer off-target events because the available sequence space in the transcriptome is significantly smaller than the genome, and if an off-target event does occur, it will be transient and less likely to induce negative side effects. Second, RNA-targeting therapeutics will be more efficient because they are cell-type independent and not have to enter the nucleus, making them easier to deliver.

[0008] At least a first aspect of the invention relates to a method of modifying an Adenine in a target RNA sequence of interest. In particular embodiments, the method comprises delivering to said target RNA: (a) a catalytically inactive (dead) Cas13 protein; (b) a guide molecule which comprises a guide sequence linked to a direct repeat sequence; and (c) an adenosine deaminase protein or catalytic domain thereof; wherein said adenosine deaminase protein or catalytic domain thereof is covalently or non-covalently linked to said dead Cas13 protein or said guide molecule or is adapted to link thereto after delivery; wherein guide molecule forms a complex with said dead Cas13 protein and directs said complex to bind said target RNA sequence of interest, wherein said guide sequence is capable of hybridizing with a target sequence comprising said Adenine to form an RNA duplex, wherein said guide sequence comprises a non-pairing Cytosine at a position corresponding to said Adenine resulting in an A-C mismatch in the RNA duplex formed; wherein said adenosine deaminase protein or catalytic domain thereof deaminates said Adenine in said RNA duplex.

[0009] In certain example embodiment the Cas13 protein is Cas13a, Cas13b or Cas 13c.

[0010] The adenosine deaminase protein or catalytic domain thereof is fused to N- or C-terminus of said dead Cas13 protein. In certain example embodiments, the adenosine deaminase protein or catalytic domain thereof is fused to said dead Cas13 protein by a linker. The linker may be (GGGGS)₃₋₁₁ (SEQ ID Nos. 1-9) GSG₅ (SEQ ID No. 10) or LEPGEKPYKCPECGKSFSQSGALTRHQRTHTR (SEQ ID No. 11).

[0011] In certain example embodiments, the adenosine deaminase protein or catalytic domain thereof is linked to an adaptor protein and said guide molecule or said dead Cas13 protein comprises an aptamer sequence capable of binding to said adaptor protein. The adaptor sequence may be selected from MS2, PP7, Qβ, F2, GA, fr, JP501, M12, R17, BZ13, JP34, JP500, KU1, M11, MX1, TW18, VK, SP, FI, ID2, NL95, TW19, AP205, Cb5, ϕCb8r, ϕCb12r, ϕCb23r, 7s and PRR1.

[0012] In certain example embodiments, the adenosine deaminase protein or catalytic domain thereof is inserted into an internal loop of said dead Cas13 protein. In certain example embodiments, the Cas13a protein comprises one or more mutations in the two HEPN domains, particularly at postion R474 and R1046 of Cas 13a protein originating from Leptotrichia wadei or amino acid positions corresponding thereto of a Cas13a ortholog.

[0013] In certain example embodiments, the Cas 13 protein is a Cas13b proteins, and the Cas13b comprises a mutation in one or more of positions R116, H121, R1177, H1182 of Cas13b protein originating from Bergeyella zoohelcum ATCC 43767 or amino acid positions corresponding thereto of a Cas13b ortholog. In certain other example embodiments, the mutation is one or more of R116A, H121A, R1177A, H1182A of Cas13b protein originating from Bergeyella zoohelcum ATCC 43767 or amino acid positions corresponding thereto of a Cas13b ortholog.

[0014] In certain example embodiments, the guide sequence has a length of about 29-53 nt capable of forming said RNA duplex with said target sequence. In certain other example embodiments, the guide sequence has a length of about 40-50 nt capable of forming said RNA duplex with said target sequence. In certain example embodiments, the distance between said non-pairing C and the 5′ end of said guide sequence is 20-30 nucleotides.

[0015] In certain example embodiments, the adenosine deaminase protein or catalytic domain thereof is a human, cephalopod, or Drosophila adenosine deaminase protein or catalytic domain thereof. In certain example embodiments, the adenosine deaminase protein or catalytic domain thereof has been modified to comprise a mutation at glutamic acid⁴⁸⁸ of the hADAR2-D amino acid sequence, or a corresponding position in a homologous ADAR protein. In certain example embodiments, the glutamic acid residue may be at position 488 or a corresponding position in a homologous ADAR protein is replaced by a glutamine residue (E488Q).

[0016] In certain other example embodiments, the adenosine deaminase protein or catalytic domain thereof is a mutated hADAR2d comprising mutation E488Q or a mutated hADAR1d comprising mutation E1008Q.

[0017] In certain example embodiments, the guide sequence comprises more than one mismatch corresponding to different adenosine sites in the target RNA sequence or wherein two guide molecules are used, each comprising a mismatch corresponding to a different adenosine sites in the target RNA sequence.

[0018] In certain example embodiments, the Cas13 protein and optionally said adenosine deaminase protein or catalytic domain thereof comprise one or more heterologous nuclear localization signal(s) (NLS(s)).

[0019] In certain example embodiments, the method further comprises, determining the target sequence of interest and selecting an adenosine deaminase protein or catalytic domain thereof which most efficiently deaminates said Adenine present in then target sequence.

[0020] The target RNA sequence of interest may be within a cell. The cell may be a eukaryotic cell, a non-human animal cell, a human cell, a plant cell. The target locus of interest may be within an animal or plant.

[0021] The target RNA sequence of interest may comprise in an RNA polynucleotide in vitro.

[0022] The components of the systems described herein may be delivered to said cell as a ribonucleoprotein complex or as one or more polynucleotide molecules. The one or more polynucleotide molecules may comprise one or more mRNA molecules encoding the components. The one or more polynucleotide molecules may be comprised within one or more vectors. The one or more polynucleotide molecules may further comprise one or more regulatory elements operably configured to express said Cas13 protein, said guide molecule, and said adenosine deaminase protein or catalytic domain thereof, optionally wherein said one or more regulatory elements comprise inducible promoters. The one or more polynucleotide molecules or said ribonucleoprotein complex may be delivered via particles, vesicles, or one or more viral vectors. The particles may comprise a lipid, a sugar, a metal or a protein. The particles may comprise lipid nanoparticles. The vesicles may comprise exosomes or liposomes. The one or more viral vectors may comprise one or more of adenovirus, one or more lentivirus or one or more adeno-associated virus.

[0023] The methods disclosed herein may be used to modify a cell, a cell line or an organism by manipulation of one or more target RNA sequences.

[0024] In certain example embodiments, the deamination of said Adenine in said target RNA of interest remedies a disease caused by transcripts containing a pathogenic G→A or C→T point mutation.

[0025] The methods maybe be used to treat a disase. In certain example embodiments, the disease is selected from Meier-Gorlin syndrome, Seckel syndrome 4, Joubert syndrome 5, Leber congenital amaurosis 10; Charcot-Marie-Tooth disease, type 2; Charcot-Marie-Tooth disease, type 2; Usher syndrome, type 2C; Spinocerebellar ataxia 28; Spinocerebellar ataxia 28; Spinocerebellar ataxia 28; Long QT syndrome 2; Sjgren-Larsson syndrome; Hereditary fructosuria; Hereditary fructosuria; Neuroblastoma; Neuroblastoma; Kallmann syndrome 1; Kallmann syndrome 1; Kallmann syndrome 1; Metachromatic leukodystrophy, Rett syndrome, Amyotrophic lateral sclerosis type 10, Li-Fraumeni syndrome, or a disease listed in Table 5. The disease may be a premature termination disease.

[0026] The methods disclosed herein, may be used to make a modification that affects the fertility of an organism. The modification may affects splicing of said target RNA sequence. The modification may introduces a mutation in a transcript introducing an amino acid change and causing expression of a new antigen in a cancer cell.

[0027] In certain example embodiments, the target RNA may be a microRNA or comprised within a microRNA. In certain example embodiments, the deamination of said Adenine in said target RNA of interest causes a gain of function or a loss of function of a gene. In certain example embodiments, the gene is a gene expressed by a cancer cell.

[0028] In another aspect, the invention comprises a modified cell or progeny thereof that is obtained using the methods disclosed herein, wherein said cell comprises a hypoxanthine or a guanine in replace of said Adenine in said target RNA of interest compared to a corresponding cell not subjected to the method. The modified cell or progeny thereof may be a eukaryotic cell an animal cell, a human cell, a therapeutic T cell, an antibody-producing B cell, a plant cell.

[0029] In another aspect, the invention comprises a non-human animal comprising said modified cell or progeny thereof. The modified may be a plant cell.

[0030] In another aspect, the invention comprises a method for cell therapy, comprising administering to a patient in need thereof the modified cells disclosed herein, wherein the presence of said modified cell remedies a disease in the patient.

[0031] In another aspect, the invention is directed to an engineered, non-naturally occurring system suitable for modifying an Adenine in a target locus of interest, comprising A) a guide molecule which comprises a guide sequence linked to a direct repeat sequence, or a nucleotide sequence encoding said guide molecule; B) a catalytically inactive Cas13 protein, or a nucleotide sequence encoding said catalytically inactive Cas13 protein; C) an adenosine deaminase protein or catalytic domain thereof, or a nucleotide sequence encoding said adenosine deaminase protein or catalytic domain thereof; wherein said adenosine deaminase protein or catalytic domain thereof is covalently or non-covalently linked to said Cas13 protein or said guide molecule or is adapted to link thereto after delivery; wherein said guide sequence is capable of hybridizing with a target RNA sequence comprising an Adenine to form an RNA duplex, wherein said guide sequence comprises a non-pairing Cytosine at a position corresponding to said Adenine resulting in an A-C mismatch in the RNA duplex formed.

[0032] In another aspect, the invention is directed to an engineered, non-naturally occurring vector system suitable for modifying an Adenine in a target locus of interest, comprising the nucleotide sequences of a), b) and c)

[0033] In another aspect, the invention is directed to an engineered, non-naturally occurring vector system, comprising one or more vectors comprising: a first regulatory element operably linked to a nucleotide sequence encoding said guide molecule which comprises said guide sequence, a second regulatory element operably linked to a nucleotide sequence encoding said catalytically inactive Cas13 protein; and a nucleotide sequence encoding an adenosine deaminase protein or catalytic domain thereof which is under control of said first or second regulatory element or operably linked to a third regulatory element; wherein, if said nucleotide sequence encoding an adenosine deaminase protein or catalytic domain thereof is operably linked to a third regulatory element, said adenosine deaminase protein or catalytic domain thereof is adapted to link to said guide molecule or said Cas13 protein after expression; wherein components A), B) and C) are located on the same or different vectors of the system.

[0034] As the methods disclosed herein demonstate the ability of Cas13 proteins to function in mammalian cells for binding and specificity of cleaving RNA, additional extended applications include editing splice variants, and measuring how RNA-binding proteins interact with RNA.

[0035] In another aspect, the invention is directed to in vitro or ex vivo host cell or progeny thereof or cell line or progeny thereof comprising the systems disclosed herein. The host cell or progeny thereof may be a a eukaryotice cell, an animal cell, a human cell, or a plant cell.

[0036] In another aspect, the invention relates to an adenosine deaminase protein or catalytic domain thereof and comprising one or more mutations as described herein elsewhere.

[0037] In certain embodiments, such adenosine deaminase protein or catalytic domain thereof is covalently or non-covalently linked to a nucleic acid binding molecule or targeting domain as described herein elsewhere. Accordingly, the invention further relates to compositions comprising said adenosine deaminase protein or catalytic domain and a nucleic acid binding molecule and to fusion proteins of said adenosine deaminase protein or catalytic domain and said nucleic acid binding molecule.

[0038] In another aspect the invention relates to an engineered composition for site directed base editing comprising a targeting domain and an adenosine deaminase, or catalytic domain thereof. In particular embodiments, the targeting domain is an oligonucleotide targeting domain. In particular embodiments, the adenosine deaminase, or catalytic domain thereof, comprises one or more mutations that increase activity or specificity of the adenosine deaminase relative to wild type. In particular embodiments, the adenosine deaminase comprises one or more mutations that changes the functionality of the adenosine deaminase relative to wild type, preferably an ability of the adenosine deaminase to deaminate cytodine as described elsewhere herein. In particular embodiments, the targeting domain is a CRISPR system comprising a CRISPR effector protein, or functional domain thereof, and a guide molecule, more particularly the CRISPR system is catalytically inactive. In particular embodiments, the CRISPR system comprises an RNA-binding protein, preferably Cas13, preferably the Cas13 protein is Cas13a, Cas13b or Cas13c, preferably wherein said Cas13 a Cas13 listed in any of Tables 1, 2, 3, 4, or 6 or is from a bacterial species listed in any of Tables 1, 2, 3, 4, or 6, preferably wherein said Cas13 protein is Prevotella sp. P5-125 Cas13b, Porphyromas gulae Cas13b, or Riemerella anatipestifer Cas13b; preferably Prevotella sp. P5-125 Cas13b. In particular embodiments, the Cas13 protein is a Cas13a protein and said Cas13a comprises one or more mutations the two HEPN domains, particularly at position R474 and R1046 of Cas13a protein originating from Leptotrichia wadei or amino acid positions corresponding thereto of a Cas13a ortholog, or wherein said Cas13 protein is a Cas13b protein and said Cas13b comprises a mutation in one or more of positions R116, H121, R1177, H1182, preferably R116A, H121A, R1177A, H1182A of Cas13b protein originating from Bergeyella zoohelcum ATCC 43767 or amino acid positions corresponding thereto of a Cas13b ortholog, or wherein said Cas13 protein is a Cas13b protein and said Cas13b comprises a mutation in one or more of positions R128, H133, R1053, H1058, preferably H133 and H1058, preferably H133A and H1058A, of a Cas13b protein originating from Prevotella sp. P5-125 or amino acid positions corresponding thereto of a Cas13b ortholog as described elsewhere herein or the Cas 13 is truncated, preferably C-terminally truncated, preferably wherein said Cas13 is a truncated functional variant of the corresponding wild type Cas13, optionally wherein said truncated Cas13b is encoded by nt 1-984 of Prevotella sp. P5-125 Cas13b or the corresponding nt of a Cas13b orthologue or homologue.

[0039] In particular embodiments, the guide molecule of the targeting domain comprises a guide sequence is capable of hybridizing with a target RNA sequence comprising an Adenine to form an RNA duplex, wherein said guide sequence comprises a non-pairing Cytosine at a position corresponding to said Adenine resulting in an A-C mismatch in the RNA duplex formed. In particular embodiments, the guide sequence has a length of about 20-53 nt, preferably 25-53 nt, more preferably 29-53 nt or 40-50 nt capable of forming said RNA duplex with said target sequence, and/or wherein the distance between said non-pairing C and the 5′ end of said guide sequence is 20-30 nucleotides. In particular embodiments, the guide sequence comprises more than one mismatch corresponding to different adenosine sites in the target RNA sequence or wherein two guide molecules are used, each comprising a mismatch corresponding to a different adenosine sites in the target RNA sequence.

[0040] In particular embodiments, of the composition the adenosine deaminase protein or catalytic domain thereof is fused to a N- or C-terminus of said oligonucleotide targeting protein, optionally by a linker as described elsewhere herein. Alternatively, said adenosine deaminase protein or catalytic domain thereof is inserted into an internal loop of said dead Cas13 protein. In a further alternative embodiment, the adenosine deaminase protein or catalytic domain thereof is linked to an adaptor protein and said guide molecule or said dead Cas13 protein comprises an aptamer sequence capable of binding to said adaptor protein as described elsewhere herein.

[0041] In particular embodiments of the composition the adenosine deaminase protein or catalytic domain thereof capable of deaminating adenosine or cytodine in RNA or is an RNA specific adenosine deaminase and/or is a bacterial, human, cephalopod, or Drosophila adenosine deaminase protein or catalytic domain thereof, preferably TadA, more preferably ADAR, optionally huADAR, optionally (hu)ADAR1 or (hu)ADAR2, preferably huADAR2 or catalytic domain thereof.

[0042] In particular embodiments of the composition, the targeting domain and optionally the adenosine protein or catalytic domain thereof comprise one or more heterologous nuclear export signal(s) (NES(s)) or nuclear localization signal(s) (NLS(s)), preferably an HIV Rev NES or MAPK NES, preferably C-terminal.

[0043] A further aspect of the invention relates to the composition as envisaged herein for use in prophylactic or therapeutic treatment, preferably wherein said target locus of interest is within a human or animal and to methods of modifying an Adenine or Cytidine in a target RNA sequence of interest, comprising delivering to said target RNA, the composition as described hereinabove. In particular embodiments, the CRISPR system and the adenonsine deaminase, or catalytic domain thereof, are delivered as one or more polynucleotide molecules, as a ribonucleoprotein complex, optionally via particles, vesicles, or one or more viral vectors. In particular embodiments, the composition is for use in the treatment or prevention of a disease caused by transcripts containing a pathogenic G→A or C→T point mutation. In particular embodiments, the invention thus comprises compositions for use in therapy. This implies that the methods can be performed in vivo, ex vivo or in vitro. In particular embodiments, the methods are not methods of treatment of the animal or human body or a method for modifying the germ line genetic identity of a human cell. In particular embodiments; when carrying out the method, the target RNa is not comprised within a human or animal cell. In particular embodiments, when the target is a human or animal target, the method is carried out ex vivo or in vitro

[0044] A further aspects relates to an isolated cell obtained or obtainable from the methods described above and/or comprising the composition described above or progeny of said modified cell, preferably wherein said cell comprises a hypoxanthine or a guanine in replace of said Adenine in said target RNA of interest compared to a corresponding cell not subjected to the method. In particular embodiments, the cell is a eukaryotic cell, preferably a human or non-human animal cell, optionally a therapeutic T cell or an antibody-producing B-cell or wherein said cell is a plant cell. A further aspect provides a non-human animal or a plant comprising said modified cell or progeny thereof. Yet a further aspect provides the modified cell as described hereinabove for use in therapy, preferably cell therapy.

### BRIEF DESCRIPTION OF THE DRAWINGS

[0045] The novel features of the invention are set forth with particularity in the appended claims. A better understanding of the features and advantages of the present invention will be obtained by reference to the following detailed description that sets forth illustrative embodiments, in which the principles of the invention are utilized, and the accompanying drawings of which:

[0046] FIG. 1 illustrates an example embodiment of the invention for targeted deamination of adenine at a target RNA sequence of interest, exemplified herein with a Cas13b protein.

[0047] FIG. 2 illustrates the Development of RNA editing as a therapeutic strategy to treat human disease at the transcript level such as when using Cas13b. Schematic of RNA base editing by Cas13-ADAR2 fusion targeting an engineered pre-termination stop codon in the luciferase transcript.

[0048] FIG. 3 Guide position and length optimization to restore luciferase expression.

[0049] FIG. 4 Exemplary sequences of adenine deaminase proteins. (SEQ ID Nos. 650-656)

[0050] FIG. 5 Guides used in an exemplary embodiment (SEQ ID Nos. 657-660 and 703)

[0051] FIG. 6: Editing efficiency correlates to edited base being further away from the DR and having a long RNA duplex, which is accomplished by extending the guide length

[0052] FIG. 7 Greater editing efficiency the further the editing site is away from the DR/protein binding area.

[0053] FIG. 8 Distance of edited site from DR

[0054] FIGS. 9A and B: Fused ADAR1 or ADAR2 to Cas13b12 (double R HEPN mutant) on the N or C-terminus. Guides are perfect matches to the stop codon in luciferase. Signal appears correlated with distance between edited base and 5′ end of the guide, with shorter distances providing better editing.

[0055] FIG. 10: Cluc/Gluc tiling for Cas13a/Cas13b interference

[0056] FIG. 11: ADAR editing quantification by NGS (luciferase reporter).

[0057] FIG. 12: ADAR editing quantification by NGS (KRAS and PPIB).

[0058] FIG. 13: Cas13a/b+shRNA specificity from RNA Seq

[0059] FIG. 14: Mismatch specificity to reduce off targets (A:A or A:G) (SEQ ID Nos. 661-668)

[0060] FIG. 15: Mismatch for on-target activity

[0061] FIG. 16: ADAR Motif preference

[0062] FIG. 17: Larger bubbles to enhance RNA editing efficiency

[0063] FIG. 18: Editing of multiple A's in a transcript (SEQ ID Nos. 669-672)

[0064] FIG. 19: Guide length titration for RNA editing

[0065] FIG. 20: Mammalian codon-optimized Cas13b orthologs mediate highly efficient RNA knockdown. (A) Schematic of representative Cas13a, Cas13b, and Cas13c loci and associated crRNAs. (B) Schematic of luciferase assay to measure Cas13a cleavage activity in HEK293FT cells. (C) RNA knockdown efficiency using two different guides targeting Cluc with 19 Cas13a, 15 Cas13b, and 5 Cas13c orthologs. Luciferase expression is normalized to the expression in non-targeting guide control conditions. (D) The top 7 orthologs performing in part C are assayed for activity with three different NLS and NES tags with two different guide RNAs targeting Cluc. (E) Cas13b12 and Cas13a2 (LwCas13a) are compared for knockdown activity against Gluc and Cluc. Guides are tiled along the transcripts and guides between Cas13b12 and Cas13a2 are position matched. (F) Guide knockdown for Cas13a2, Cas13b6, Cas13b11, and Cas13b12 against the endogenous KRAS transcript and are compared against corresponding shRNAs.

[0066] FIG. 21: Cas13 enzymes mediate specific RNA knockdown in mammalian cells. (A) Schematic of semi-degenerate target sequences for Cas13a/b mismatch specificity testing. (SEQ ID Nos. 673-694) (B) Heatmap of single mismatch knockdown data for Cas13 a/b. Knockdown is normalized to non-targeting (NT) guides for each enzyme. (C) Double mismatch knockdown data for Cas13a. The position of each mismatch is indicated on the X and Y axes. Knockdown data is the sum of all double mismatches for a given set of positions. Data is normalized to NT guides for each enzyme. (D) Double mismatch knockdown data for Cas13b. See C for description. (E) RNA-seq data comparing transcriptome-wide specificity for Cas13 a/b and shRNA for position-matched guides. The Y axis represents read counts for the targeting condition and the X axis represents counts for the non-targeting condition. (F) RNA expression as calculated from RNA-seq data for Cas13 a/b and shRNA. (G) Significant off-targets for Cas13 a/b and shRNA from RNA-seq data. Significant off-targets were calculated using FDR <0.05.

[0067] FIG. 22: Catalytically inactive Cas13b-ADAR fusions enable targeted RNA editing in mammalian cells. (A) Schematic of RNA editing with Cas13b-ADAR fusion proteins to remove stop codons on the Cypridina luciferase transcript. (B) RNA editing comparison between Cas13b fused with wild-type ADAR2 and Cas13b fused with the hyperactive ADAR2 E488Q mutant for multiple guide positions. Luciferase expression is normalized to Gaussia luciferase control values. (C) RNA editing comparisons between 30, 50, 70, and 84 nt guides designed to target various positions surrounding the editing site. (D) Effect of surrounding motif sequence on ADAR editing efficiency on the Cypridina luciferase transcript. (SEQ ID No. 695) (E) Schematic showing the position and length of guides used for sequencing quantification relative to the stop codon on the Cypridina luciferase transcript. (F) On- and off-target editing efficiencies for each guide design at the corresponding adenine bases on the Cypridina luciferase transcript as quantified by sequencing. (G) Luciferase readout of guides with varied bases opposite to the targeted adenine.

[0068] FIG. 23: Endogenous RNA editing with Cas13b-ADAR fusions. (A) Next generation sequencing of endogenous Cas13b12-ADAR editing of endogenous KRAS and PPIB loci. Two different regions per transcript were targeted and A->G editing was quantified at all adenines in the vicinity of the targeted adenine.

[0069] FIG. 24: Strategy for determining optimal guide position.

[0070] FIG. 25: (A) Cas13b-huADAR2 promotes repair of mutated luciferase transcripts. (B) Cas13b-huADAR1 promotes repair of mutated luciferase transcripts. (C) Comparison of human ADARI and human ADAR2.

[0071] FIG. 26: Comparison of E488Q vs. wt dADAR2 editing. E488Q is a hyperactive mutant of dADAR2.

[0072] FIG. 27: Transcripts targeted by Cas13b-huADAR2-E488Q contain the expected A-G edit. (A) heatmap. (B) Positions in template. Only A sites are shown with the editing rate to G as in heatmap.

[0073] FIG. 28: Endogenous tiling of guides. (A) KRAS: heatmap. Only A sites are shown with the editing rate to G as in heatmap. (B) Positions in template (bottom). (C) PPIB: heatmap. Only A sites are shown with the editing rate to G as in heatmap. Positions in template (D).

[0074] FIG. 29: Non-targeting editing.

[0075] FIG. 30: Linker optimization.

[0076] FIG. 31: Cas13b ADAR can be used to correct pathogenic A>G mutations from patients in expressed cDNAs.

[0077] FIG. 32: Cas13b-ADAR has a slight restriction on 5′ G motifs.

[0078] FIG. 33: Screening degenerate PFS locations for effect on editing efficiency. All PFS (4-N) identities have higher editing than non-targeting. FIG. A. (SEQ ID Nos. 696-699)

[0079] FIG. 34: Reducing off-target editing in the target transcript.

[0080] FIG. 35: Reducing off-target editing in the target transcript.

[0081] FIG. 36: Cas13b-ADAR transcriptome specificity. On-target editing is 71%. (A) targeting guide; 482 significant sites. (B) non-targeting guide; 949 significant sites. Note that chromosome 0 is Glue and chromosome 1 is Clue; human chromosomes are then in order after that.

[0082] FIG. 37: Cas13b-ADAR transcriptome specificity. (A) targeting guide. (B) non-targeting guide.

[0083] FIG. 38: Cas13b has the highest efficiency compared to competing ADAR editing strategies.

[0084] FIG. 39: Competing RNA editing systems. (A-B) BoxB; on-target editing is 63%; (A) targeting guide—2020 significant sites; (B) non-targeting guide—1805 significant sites. (C-D) Stafforst; on-target editing is 36%; (C) targeting guide—176 significant sites; (D) non-targeting guide—186 significant sites.

[0085] FIG. 40: Dose titration of ADAR. crRNA amount is constant.

[0086] FIG. 41: Dose response effect on specificity. (A-B) 150 ng Cas13-ADAR; on-target editing is 83%; (A) targeting guide—1231 significant sites; (B) non-targeting guide—520 significant sites. (C-D) 10 ng Cas13-ADAR; on-target editing is 80%; (C) targeting guide—347 significant sites; (D) non-targeting guide—223 significant sites.

[0087] FIG. 42: ADAR1 seems more specific than ADAR2. On-target editing is 29%. (A) targeting guide; 11 significant sites. (B) non-targeting guide; 6 significant sites. Note that chromosome 0 is Glue and chromosome 1 is Clue; human chromosomes are then in order after that.

[0088] FIG. 43: ADAR specificity mutants have enhanced specificity. (A) Targeting guide. (B) Non-targeting guide. (C) Targeting to non-targeting ratio. (D) Targeting and non-targeting guide.

[0089] FIG. 44: ADAR mutant luciferase results plotted along the contact points of each residue with the RNA target.

[0090] FIG. 45: ADAR specificity mutants have enhanced specificity. Purple points are mutants selected for whole transcriptome off-target NGS analysis. Red point is the starting point (i.e. E488Q mutant). Note that all additional mutants also have the E488Q mutation.

[0091] FIG. 46: ADAR mutants are more specific according to NGS. (A) on target. (B) Off-target.

[0092] FIG. 47: Luciferase data on ADAR specificity mutants matches the NGS. (A) Targeting guide selected for NGS. (B) Non-targeting guide selected for NGS. Luciferase data matches the NGS data in FIG. 46. The orthologs that have fewer activity with non-targeting guide have fewer off-targets across the transcriptome and their on-target editing efficiency can be predicted by the targeting guide luciferase condition.

[0093] FIG. 48: C-terminal truncations of Cas13b 12 are still highly active in ADAR editing.

[0094] FIG. 49: Characterization of a highly active Cas13b ortholog for RNA knockdown A) Schematic of stereotypical Cas13 loci and corresponding crRNA structure. B) Evaluation of 19 Cas13a, 15 Cas13b, and 7 Cas13c orthologs for luciferase knockdown using two different guides. Orthologs with efficient knockdown using both guides are labeled with their host organism name. Values are normalized to a non-targeting guide with designed against the E. coli LacZ transcript, with no homology to the human transcriptome. C) PspCas13b and LwaCas13a knockdown activity are compared by tiling guides against Gluc and measuring luciferase expression. Values represent mean+/−S.E.M. Non-targeting guide is the same as in FIG. 49B. D) PspCas13b and LwaCas13a knockdown activity are compared by tiling guides against Cluc and measuring luciferase expression. Values represent mean+/−S.E.M. Non-targeting guide is the same as in FIG. 49B. E) Expression levels in log 2(transcripts per million (TPM)) values of all genes detected in RNA-seq libraries of non-targeting control (x-axis) compared to Gluc-targeting condition (y-axis) for LwaCas13a (red) and shRNA (black). Shown is the mean of three biological replicates. The Gluc transcript data point is labeled. Non-targeting guide is the same as in FIG. 49B. F) Expression levels in log 2(transcripts per million (TPM)) values of all genes detected in RNA-seq libraries of non-targeting control (x-axis) compared to Gluc-targeting condition (y-axis) for PspCas13b (blue) and shRNA (black). Shown is the mean of three biological replicates. The Gluc transcript data point is labeled. Non-targeting guide is the same as in FIG. 49B. G) Number of significant off-targets from Gluc knockdown for LwaCas13a, PspCas13b, and shRNA from the transcriptome wide analysis in E and F.

[0095] FIG. 50: Engineering dCas13b-ADAR fusions for RNA editing A) Schematic of RNA editing by dCas13b-ADAR fusion proteins. Catalytically dead Cas13b (dCas13b) is fused to the deaminase domain of human ADAR (ADAR_{DD}), which naturally deaminates adenosines to insosines in dsRNA. The crRNA specifies the target site by hybridizing to the bases surrounding the target adenosine, creating a dsRNA structure for editing, and recruiting the dCas13b-ADAR_{DD} fusion. A mismatched cytidine in the crRNA opposite the target adenosine enhances the editing reaction, promoting target adenosine deamination to inosine, a base that functionally mimics guanosine in many cellular reactions. B) Schematic of Cypridina luciferase W85X target and targeting guide design. (SEQ ID Nos. 700 and 701) Deamination of the target adenosine restores the stop codon to the wildtype tryptophan. Spacer length is the region of the guide that contains homology to the target sequence. Mismatch distance is the number of bases between the 3′ end of the spacer and the mismatched cytidine. The cytidine mismatched base is included as part of the mismatch distance calculation. C) Quantification of luciferase activity restoration for Cas13b-dADAR1 (left) and Cas13b-ADAR2-cd (right) with tiling guides of length 30, 50, 70, or 84 nt. All guides with even mismatch distances are tested for each guide length. Values are background subtracted relative to a 30 nt non-targeting guide that is randomized with no sequence homology to the human transcriptome. D) Schematic of target site for targeting Cypridinia luciferase W85X. (SEQ ID No. 702) E) Sequencing quantification of A->I editing for 50 nt guides targeting Cypridinia luciferase W85X. Blue triangle indicates the targeted adenosine. For each guide, the region of duplex RNA is outlined in red. Values represent mean+/−S.E.M. Non-targeting guide is the same as in FIG. 50C.

[0096] FIG. 51: Measuring sequence flexibility for RNA editing by REPAIRv1 Schematic of screen for determining Protospacer Flanking Site (PFS) preferences of RNA editing by REPAIRv1. A randomized PFS sequence is cloned 5′ to a target site for REPAIR editing. Following exposure to REPAIR, deep sequencing of reverse transcribed RNA from the target site and PFS is used to associate edited reads with PFS sequences. B) Distributions of RNA editing efficiencies for all 4-N PFS combinations at two different editing sites. C) Quantification of the percent editing of REPAIRv1 at Cluc W85 across all possible 3 base motifs. Values represent mean+/−S.E.M. Non-targeting guide is the same as in FIG. 50C. D) Heatmap of 5′ and 3′ base preferences of RNA editing at Cluc W85 for all possible 3 base motifs

[0097] FIG. 52: Correction of disease-relevant mutations with REPAIRv1 A) Schematic of target and guide design for targeting AVPR2 878G>A. (SEQ ID Nos. 705-708) B) The 878G>A mutation in AVPR2 is corrected to varying percentages using REPAIRv1 with three different guide designs. For each guide, the region of duplex RNA is outlined in red. Values represent mean+/−S.E.M. Non-targeting guide is the same as in FIG. 50C. C) Schematic of target and guide design for targeting FANCC 1517G>A. (SEQ ID Nos. 709-712) D) The 1517G>A mutation in FANCC is corrected to varying percentages using REPAIRv1 with three different guide designs. For each guide, the region of duplex RNA is outlined in red. The heatmap scale bar is the same as in panel B. Values represent mean+/−S.E.M. Non-targeting guide is the same as in FIG. 50C. E) Quantification of the percent editing of 34 different disease-relevant G>A mutations using REPAIRv1. Non-targeting guide is the same as in FIG. 50C. F) Analysis of all the possible G>A mutations that could be corrected as annotated by the ClinVar database. The distribution of editing motifs for all G>A mutations in ClinVar is shown versus the editing efficiency by REPAIRv1 per motif as quantified on the Gluc transcript. G) The distribution of editing motifs for all G>A mutations in ClinVar is shown versus the editing efficiency by REPAIRv1 per motif as quantified on the Gluc transcript. Values represent mean+/−S.E.M.

[0098] FIG. 53: Characterizing specificity of REPAIRv1 A) Schematic of KRAS target site and guide design. (SEQ ID Nos. 713-720) B) Quantification of percent editing for tiled KRAS-targeting guides. Editing percentages are shown at the on-target and neighboring adenosine sites. For each guide, the region of duplex RNA is indicated by a red rectangle. Values represent mean+/−S.E.M. C) Transcriptome-wide sites of significant RNA editing by REPAIRv1 with Cluc targeting guide. The on-target site Cluc site (254 A>G) is highlighted in orange. D) Transcriptome-wide sites of significant RNA editing by REPAIRv1 (150 ng REPAIR vector transfected) with non-targeting guide. Non-targeting guide is the same as in FIG. 50C.

[0099] FIG. 54: Rational mutagenesis of ADAR2 to improve the specificity of REPAIRv1 A) Quantification of luciferase signal restoration by various dCas13-ADAR2 mutants as well as their specificity score plotted along a schematic for the contacts between key ADAR2 deaminase residues and the dsRNA target. All deaminase mutations were made on the dCas13-ADAR2_{DD}(E488Q) background. The specificity score is defined as the ratio of the luciferase signal between targeting guide and non-targeting guide conditions. Schematic of ADAR2 deaminase domain contacts with dsRNA is adapted from ref (20) B) Quantification of luciferase signal restoration by various dCas13-ADAR2 mutants versus their specificity score. Non-targeting guide is the same as in FIG. 50C. C) Measurement of the on-target editing fraction as well as the number of significant off-targets for each dCas13-ADAR2 mutant by transcriptome wide sequencing of mRNAs. Values represent mean+/−S.E.M. Non-targeting guide is the same as in FIG. 50C. D) Transcriptome-wide sites of significant RNA editing by REPAIRv1 and REPAIRv2 with a guide targeting a pretermination site in Cluc. The on-target Cluc site (254 A>G) is highlighted in orange. 10 ng of REPAIR vector was transfected for each condition. E) RNA sequencing reads surrounding the on-target Cluc editing site (SEQ ID No. 721) (254 A>G) highlighting the differences in off-target editing between REPAIRv1 and REPAIRv2. All A>G edits are highlighted in red while sequencing errors are highlighted in blue. Gaps reflect spaces between aligned reads. Non-targeting guide is the same as in FIG. 50C. F) RNA editing by REPAIRv1 and REPAIRv2 with guides targeting an out-of-frame UAG site in the endogenous KRAS and PPIB transcripts. The on-target editing fraction is shown as a sideways bar chart on the right for each condition row. The duplex region formed by the guide RNA is shown by a red outline box. Values represent mean+/−S.E.M. Non-targeting guide is the same as in FIG. 50C.

[0100] FIG. 55: Bacterial screening of Cas13b orthologs for in vivo efficiency and PFS determination. A) Schematic of bacterial assay for determining the PFS of Cas13b orthologs. Cas13b orthologs with beta-lactamase targeting spacers (SEQ ID No. 722) are co-transformed with beta-lactamase expression plasmids containing randomized PFS sequences and subjected to double selection. PFS sequences that are depleted during co-transformation with Cas13b suggest targeting activity and are used to infer PFS preferences. B) Quantitation of interference activity of Cas13b orthologs targeting beta-lactamase as measured by colony forming units (cfu). Values represent mean+/−S.D. C) PFS logos for Cas13b orthologs as determined by depleted sequences from the bacterial assay. PFS preferences are derived from sequences depleted in the Cas13b condition relative to empty vector controls. Depletion values used to calculate PFS weblogos are listed in table 7.

[0101] FIG. 56: Optimization of Cas13b knockdown and further characterization of mismatch specificity. A) Gluc knockdown with two different guides is measured using the top 2 Cas13a and top 4 Cas13b orthologs fused to a variety of nuclear localization and nuclear export tags. B) Knockdown of KRAS is measured for LwaCas13a, RanCas13b, PguCas13b, and PspCas13b with four different guides and compared to four position-matched shRNA controls. Non-targeting guide is the same as in FIG. 49B. shRNA non-targeting guide sequence is listed in table 11. C) Schematic of the single and double mismatch plasmid libraries used for evaluating the specificity of LwaCas13a and PspCas13b knockdown. Every possible single and double mismatch is present in the target sequence as well as in 3 positions directly flanking the 5′ and 3′ ends of the target site. (SEQ ID Nos. 723-734) D) The depletion level of transcripts with the indicated single mismatches are plotted as a heatmap for both the LwaCas13a and PspCas13b conditions. (SEQ ID Nos. 723 and 736) The wildtype base is outlined by a green box. E) The depletion level of transcripts with the indicated double mismatches are plotted as a heatmap for both the LwaCas13a and PspCas13b conditions (SEQ ID Nos. 723 and 736). Each box represents the average of all possible double mismatches for the indicated position.

[0102] FIG. 57: Characterization of design parameters for dCas13-ADAR2 RNA editing A) Knockdown efficiency of Gluc targeting for wildtype Cas13b and catalytically inactive H133A/H1058A Cas13b (dCas13b). B) Quantification of luciferase activity restoration by dCas13b fused to either the wildtype ADAR2 catalytic domain or the hyperactive E488Q mutant ADAR2 catalytic catalytic domain, tested with tiling Cluc targeting guides. C) Guide design and sequencing quantification of A->I editing for 30 nt guides targeting Cypridinia luciferase W85X D) Guide design and sequencing quantification of A->I editing for 50 nt guides targeting PPIB. E) Influence of linker choice on luciferase activity restoration by REPAIRv1. F) Influence of base identify opposite the targeted adenosine on luciferase activity restoration by REPAIRv1 (SEQ ID Nos. 754 and 755). Values represent mean+/−S.E.M.

[0103] FIG. 58: ClinVar motif distribution for G>A mutations. The number of each possible triplet motif observed in the ClinVar database for all G>A mutations.

[0104] FIG. 59: Truncations of dCas13b still have functional RNA editing. Various N-terminal and C-terminal truncations of dCas13b allow for RNA editing as measured by restoration of luciferase signal for the CluceW85X reporter. Values represent mean+/−S.E.M. The construct length refers to the coding sequence of the REPAIR constructs.

[0105] FIG. 60: Comparison of other programmable ADAR systems with the dCas13-ADAR2 editor. A) Schematic of two programmable ADAR schemes: BoxB-based targeting and full length ADAR2 targeting. In the BoxB scheme (top), the ADAR2 deaminase domain (ADAR2_{DD}(E488Q)) is fused to a small bacterial virus protein called lambda N (kN), which binds specifically a small RNA sequence called BoxB- [symbol] , and the fusion protein is recruited to target adenosines by a guide RNA containing homology to the target site and hairpins that BoxB- [symbol] binds to. Full length ADAR2 targeting utilizes a guide RNA with homology to the target site and a motif recognized by the double strand RNA binding domains of ADAR2. A guide RNA containing two BoxB- [symbol] hairpins can then guide the ADAR2_{DD} (E488Q), − [symbol] N for site specific editing. In the full length ADAR2 scheme (bottom), the dsRNA binding domains of ADAR2 bind a hairpin in the guide RNA, allowing for programmable ADAR2 editing (SEQ ID Nos. 756-760). B) Transcriptome-wide sites of significant RNA editing by BoxB-ADAR2 DD(E488Q) with a guide targeting Cluc and a non-targeting guide. The on-target Cluc site (254 A>G) is highlighted in orange. C) Transcriptome-wide sites of significant RNA editing by ADAR2 with a guide targeting Cluc and a non-targeting guide. The on-target Cluc site (254 A>G) is highlighted in orange. D) Transcriptome-wide sites of significant RNA editing by REPAIRv1 with a guide targeting Cluc and a non-targeting guide. The on-target Cluc site (254 A>G) is highlighted in orange. The non-targeting guide is the same as in FIG. 50C. E) Quantitation of on-target editing rate percentage for BoxB-ADAR2_{DD}(E488Q), ADAR2, and REPAIRv1 for targeting guides against Cluc. F) Overlap of off-target sites between different targeting and non-targeting conditions for programmable ADAR systems. The values plotted are the percent of the maximum possible intersection of the two off-target data sets.

[0106] FIG. 61: Efficiency and specificity of dCas13b-ADAR2 mutants A) Quantitation of luciferase activity restoration by dCas13b-ADAR2_{DD}(E488Q) mutants for Cluc-targeting and non-targeting guides. Non-targeting guide is the same as in FIG. 50C. B) Relationship between the ratio of targeting and non-targeting guides and the number of RNA-editing off-targets as quantified by transcriptome-wide sequencing C) Quantification of number of transcriptome-wide off-target RNA editing sites versus on-target Clue editing efficiency for dCas13b-ADAR2_{DD}(E488Q) mutants.

[0107] FIG. 62: Transcriptome-wide specificity of RNA editing by dCas13b-ADAR2_{DD}(E488Q) mutants A) Transcriptome-wide sites of significant RNA editing by dCas13b-ADAR2_{DD}(E488Q) mutants with a guide targeting Cluc. The on-target Cluc site (254 A>G) is highlighted in orange. B) Transcriptome-wide sites of significant RNA editing by dCas13b-ADAR2_{DD}(E488Q) mutants with a non-targeting guide.

[0108] FIG. 63: Characterization of motif biases in the off-targets of dCas13b-ADAR2_{DD}(E488Q) editing. A) For each dCas13b-ADAR2_{DD}(E488Q) mutant, the motif present across all A>G off-target edits in the transcriptome is shown. B) The distribution of off-target A>I edits per motif identity is shown for REPAIRv1 with targeting and non-targeting guide. C) The distribution of off-target A>I edits per motif identity is shown for REPAIRv2 with targeting and non-targeting guide.

[0109] FIG. 64: Further characterization of REPAIRv1 and REPAIRv2 off-targets. A) Histogram of the number of off-targets per transcript for REPAIRv1. B) Histogram of the number of off-targets per transcript for REPAIRv2.C) Variant effect prediction of REPAIRv1 off targets. D) Distribution of REPAIRv1 off targets in cancer-related genes. TSG, tumor suppressor gene. E) Variant effect prediction of REPAIRv2 off targets. F) Distribution of REPAIRv2 off targets in cancer-related genes.

[0110] FIG. 65: RNA editing efficiency and specificity of REPAIRv1 and REPAIRv2. A) Quantification of percent editing of KRAS with KRAS-targeting guide 1 at the targeted adenosine and neighboring sites for REPAIRv1 and REPAIRv2. For each guide, the region of duplex RNA is outlined in red. Values represent mean+/−S.E.M. Non-targeting guide is the same as in FIG. 50C. B) Quantification of percent editing of KRAS with KRAS-targeting guide 3 at the targeted adenosine and neighboring sites for REPAIRv1 and REPAIRv2. Non-targeting guide is the same as in FIG. 50C. C) Quantification of percent editing of PPIB with PPIB-targeting guide 2 at the targeted adenosine and neighboring sites for REPAIRv1 and REPAIRv2. Non-targeting guide is the same as in FIG. 50C.

[0111] FIG. 66: Demonstration of all potential codon changes with a A>I RNA editor. A) Table of all potential codon transitions enabled by A>I editing. B) A codon table demonstrating all the potential codon transitions enabled by A>I editing. Adapted and modified based on J. D. Watson, Molecular biology of the gene. (Pearson, Boston, ed. Seventh edition, 2014), pp. xxxiv, 872 pages. (38). C) Model of REPAIR A to I editing of a precisely encoded nucleotide via a mismatch in the guide sequence. The A to I transition is mediated by the catalytic activity of the ADAR2 deaminase domain and will be read as a guanosine by translational machinery. The base change does not rely on endogenous repair machinery and is permanent for as long as the RNA molecule exists in the cell. D) REPAIR can be used for correction of Mendelian disease mutations. E) REPAIR can be used for multiplexed A to I editing of multiple variants for engineering pathways or modifying disease. Multiplexed guide delivery can be achieved by delivering a single CRISPR array expression cassette since the Cas13b enzyme processes its own array. F) REPAIR can be used for modifying protein function through amino acid changes that affect enzyme domains, such as kinases. G) REPAIR can modulate splicing of transcripts by modifying the splice acceptor site.

[0112] FIG. 67: Additional truncations of Psp dCas13b.

[0113] FIG. 68: Potential effect of dosage on off target activity.

[0114] FIG. 69: Relative expression of Cas13 orthologs in mammalian cells and correlation of expression with interference activity. A) Expression of Cas13 orthologs as measured by msfGFP fluoresence. Cas13 orthologs C-terminally tagged with msfGFP were transfected into HEK293FT cells and their fluorescence measured 48 hours post transfection. B) Correlation of Cas13 expression to interference activity. The average RLU of two Gluc targeting guides for Cas13 orthologs, separated by subfamily, is plotted versus expression as determined by msfGFP fluoresence. The RLU for targeting guides are normalized to RLU for a non-targeting guide, whose value is set to 1. The non-targeting guide is the same as in FIG. 49B for Cas13b.

[0115] FIG. 70: Comparison of RNA editing activity of dCas13b and REPAIRv1. A) Schematic of guides used to target the W85X mutation in the Cluc reporter (SEQ ID Nos. 911-917) B) Sequencing quantification of A to I editing for indicated guides transfected with dCas13b. For each guide, the region of duplex RNA is outlined in red. Values represent mean+/−S.E.M. Non-targeting guide is the same as in FIG. 50C. C) Sequencing quantification of A to I editing for indicated guides transfected with REPAIRv1. For each guide, the region of duplex RNA is outlined in red. Values represent mean+/−S.E.M. Non-targeting guide is the same as in FIG. 50C. D) Comparison of on-target A to I editing rates for dCas13b and dCas13b-ADAR2DD(E488Q) for guides tested in panel B and C. E) Influence of base identify opposite the targeted adenosine on luciferase activity restoration by REPAIRv1. Values represent mean+/−S.E.M. (SEQ ID Nos. 754 and 755)

[0116] FIG. 71: REPAIRv1 editing activity evaluated without a guide and in comparison to ADAR2 deaminase domain alone. A) Quantification of A to I editing of the Clue W85X mutation by REPAIRv1 with and without guide as well as the ADAR2 deaminase domain only without guide. Values represent mean+/−S.E.M. Non-targeting guide is the same as in FIG. 50C. B) Number of differentially expressed genes in the REPAIRv1 and ADAR2DD conditions from panel A. C) The number of significant off-targets from the REPAIRv1 and ADAR2DD conditions from panel A. D) Overlap of off-target A to I editing events between the REPAIRv1 and ADAR2DD conditions from panel A. The values plotted are the percent of the maximum possible intersection of the two off-target data sets.

[0117] FIG. 72: Evaluation of off-target sequence similarity to the guide sequence. A) Distribution of the number of mismatches (hamming distance) between the targeting guide sequence and the off-target editing sites for REPAIRv1 with a Cluc targeting guide. B) Distribution of the number of mismatches (hamming distance) between the targeting guide sequence and the off-target editing sites for REPAIRv2 with a Cluc targeting guide.

[0118] FIG. 73: Comparison of REPAIRv1, REPAIRv2, ADAR2 RNA targeting, and BoxB RNA targeting at two different doses of vector (150 ng and 10 ng effector). A) Quantification of RNA editing activity at the Cluc W85X (254 A>I) on-target editing site by REPAIRv1, REPAIRv2, ADAR2 RNA targeting, and BoxB RNA targeting approaches. Each of the four methods were tested with a targeting or non-targeting guide. Values shown are the mean of the three replicates. B) Quantification of RNA editing off-targets by REPAIRv1, REPAIRv2, ADAR2 RNA targeting, and BoxB RNA targeting approaches. Each of the four methods were tested with a targeting guide for the Cluc W85X (254 A>I) site or non-targeting guide. For REPAIR constructs, non-targeting guide is the same as in FIG. 50C.

[0119] FIG. 74: RNA editing efficiency and genome-wide specificity of REPAIRv1 and REPAIRv2. A) Quantification of RNA editing activity at the PPIB guide 1 on-target editing site by REPAIRv1, REPAIRv2 with targeting and non-targeting guides. Values represent mean+/−S.E.M. B) Quantification of RNA editing activity at the PPIB guide 2 on-target editing site by REPAIRv1, REPAIRv2 with targeting and non-targeting guides. Values represent mean+/−S.E.M. C) Quantification of RNA editing off-targets by REPAIRv1 or REPAIRv2 with PPIB guide 1, PPIB guide 2, or non-targeting guide. D) Overlap of off-targets between REPAIRv1 for PPIB targeting, Cluc targeting, and non-targeting guides. The values plotted are the percent of the maximum possible intersection of the two off-target data sets.

[0120] FIG. 75: High coverage sequencing of REPAIRv1 and REPAIRv2 off-targets. A) Quantitation of off-target edits for REPAIRv1 and REPAIRv2 as a function of read depth with a total of 5 million reads (12.5× coverage), 15 million reads (37.5× coverage) and 50 million reads (125× coverage) per condition. B) Overlap of off-target sites at different read depths of the following conditions: REPAIRv1 versus REPAIRv1 (left), REPAIRv2 versus REPAIRv2 (middle), and REPAIRv1 versus REPAIRv2 (right). The values plotted are the percent of the maximum possible intersection of the two off-target data sets. C) Editing rate of off-target sites compared to the coverage (log 2(number of reads)) of the off-target for REPAIRv1 and REPAIRv2 targeting conditions at different read depths. D) Editing rate of off-target sites compared to the log 2(TPM+1) of the off-target gene expression for REPAIRv1 and REPAIRv2 targeting conditions at different read depths.

[0121] FIG. 76: Quantification of REPAIRv2 activity and off-targets in the U2OS cell line. A) Transcriptome-wide sites of significant RNA editing by REPAIRv2 with a guide targeting Cluc in the U2OS cell line. The on-target Cluc site (254 A>I) is highlighted in orange. B) Transcriptome-wide sites of significant RNA editing by REPAIRv2 with a non-targeting guide in the U2OS cell line. C) The on-target editing rate at the Cluc W85X (254 A>I) by REPAIRv2 with a targeting guide or non-targeting guide in the U2OS cell line. D) Quantification of off-targets by REPAIRv2 with a guide targeting Cluc or non-targeting guide in the U2OS cell line.

[0122] FIG. 77: Identifying additional ADAR mutants with increased efficiency and specificity. Cas13b-ADAR fusions with mutations in the ADAR deaminase domain, assayed on the luciferase target. Lower non-targeting RLU is indicative of more specificity.

[0123] FIG. 78: Identifying additional ADAR mutants with increased efficiency and specificity. Mutants were chosen from flow cytometry data for low, medium, and high-disrupting mutantions.

[0124] FIG. 79: Identifying additional ADAR mutants with increased efficiency and specificity.

[0125] FIG. 80: Identifying additional ADAR mutants with increased efficiency and specificity.

[0126] FIG. 81: Identifying additional ADAR mutants with increased efficiency and specificity through saturating mutagenesis on V351.

[0127] FIG. 82: Identifying additional ADAR mutants with increased efficiency and specificity through saturating mutagenesis on T375.

[0128] FIG. 83: Identifying additional ADAR mutants with increased efficiency and specificity through saturating mutagenesis on R455.

[0129] FIG. 84: Identifying additional ADAR mutants with increased efficiency and specificity through saturating mutagenesis.

[0130] FIG. 85: 3′ binding loop residue saturation mutagenesis.

[0131] FIG. 86: Select ADAR mutants with increased efficiency and specificity. Screening has identified multiple mutants with increased specificity compared to REPAIRv1 and increased activity compared to REPAIRv1 and REPAIRv2.

[0132] FIG. 87: Second round saturating mutagenesis performed on promising residues with additional E488 mutations.

[0133] FIG. 88: Second round saturating mutagenesis performed on promising residues with additional E488 mutations.

[0134] FIG. 89: Combinations of ADAR mutants identified through screening.

[0135] FIG. 90: Combinations of ADAR mutants identified through screening.

[0136] FIG. 91: Testing most promising mutants by NGS.

[0137] FIG. 92: Testing most promising mutants by NGS.

[0138] FIG. 93: Testing most promising mutants by NGS.

[0139] FIG. 94: Testing most promising mutants by NGS.

[0140] FIG. 95: Finding most promising base flip for C-U activity on existing constructs.

[0141] FIG. 96: Testing ADAR mutants with best guide for C->U activity.

[0142] FIG. 97: Validation of V351 mutants for C>U activity.

[0143] FIG. 98: Testing Cas13b-cytidine deaminase fusions with testing panning guides across construct:

[0144] FIG. 99: Testing Cas13b-cytidine deaminase fusions with testing panning guides across construct.

[0145] FIG. 100 is a graph depicting that Cas13b orthologs fused to ADAR exhibit variable protein recovery and off-target effects. 15 dCas13b orthologs were fused to ADAR and targeted to edit a Cypridina luciferase reporter with an introduced pretermination site that, when corrected, restores luciferase function. A nontargeting guide was additionally used to evaluate off target effects. REPAIRv1 and REPAIRv2 are as published in Cox et al. (2017). Different orthologs fused to ADAR exhibit different ability to recover functional luciferase, as well as different off-target effects. In particular, Cas12b6 (Riemerella anatipestifer (RanCas13b)) appears to have a better ability to recover functional luciferase as well as fewer off-target events than REPAIRv1. Points marked in red were selected for further engineering and analysis as these were the two orthologs that exhibited the highest functional protein recovery other than Cas13b12 (REPAIRv1).

[0146] FIG. 101 is a graph showing targeted sequencing of editing locus for all orthologs. Targeted next generation sequencing of the editing locus shows that most Cas13b orthologs fused to ADAR mediate bona fide editing events at the target adenosine. Orthologs are ordered from lowest to highest editing percentage from top to bottom. In particular, although Cas13b6 is observed to exhibit higher functional luciferase recovery (FIG. 100), REPAIRv1 still shows a higher percentage of editing events at the target adenosine. Additionally, different orthologs show different percentages of off target edits at other adenosines within the sequencing window, and, in particular, Cas13b6 shows much lower editing at A33 both in the targeting and non-targeting condition than REPAIRv1, which is consistent with the lower off-target signal observed in the luciferase assay (FIG. 100). The ratio between on target and off-target editing is not consistent between orthologs, and in particular, Cas13b6 seems to maximize the amount of on-target edits per off-target edit.

[0147] FIG. 102 is a schematic illustrating design constraints for delivery with Adeno-associated virus (AAV). AAV, a clinically relevant viral delivery vector, has a packaging limit of about 4.7 kilobases for efficient packaging and titering of the virus. However, REPAIR is much larger than this when the promoter is included. Additionally, it would be ideal to deliver the entire system (REPAIR fusion protein+guide RNA) in a single vector for ease of production and delivery. Therefore Cas13b orthologs are chosen to be truncated down

[0148] FIG. 103A is a graph showing results of truncating N-terminus of Cas13b6. Each ortholog was truncated down in 20 amino acid (60 base pair) intervals up to 300 amino acids (900 base pairs) from each of the N and C termini of the protein. RNA editing activity was then evaluated via the luciferase correction assay previously described. Luciferase recovery in the targeting guideRNA condition is shown on the y-axis, versus the size in amino acids of the truncated Cas13b ortholog on the x-axis. Truncating at different points changes the ability of the REPAIR fusion to recover luciferase function—some are better and some are worse than the full length Cas13b protein, and different patterns are observed with different orthologs.

[0149] FIG. 103B is a graph showing results of truncating C-terminus of Cas13b6. For Cas13b6, the CΔ300 truncation was chosen as having the best activity with a sufficiently small size.

[0150] FIG. 104A is a graph showing results of truncating N-terminus of Cas13b11. FIG. 104B is a graph showing results of truncating C-terminus of Cas13b11. For Cas13b11, the NΔ280 truncation was chosen as having the best activity with a sufficiently small size.

[0151] FIG. 105A is a graph showing results of truncating N-terminus of Cas13b12. FIG. 104B is a graph showing results of truncating C-terminus of Cas13b12. For Cas13b12, the CΔ300 truncation was chosen as having the best activity with a sufficiently small size.

[0152] FIG. 106 is a graph showing tiling guide RNAs across a single editing site. Editing is targeted to an adenosine in an introduced premature stop codon in a luciferase reporter, which, if corrected, will restore the amino acid at this position to a tryptophan and thus restore function of the luciferase. Guide RNAs with both 50 and 30 nucleotide spacers are tiled across this editing site such that the target adenosine is at a different position within the guide RNA. Each of these guides were evaluated with both the full length and best truncations previously noted on the preceding three slides. (SEQ ID Nos. 700 and 701)

[0153] FIG. 107 is a graph showing Cas13b6 results with different guide RNAs. The results show that target adenosine position within the spacer sequence does have an effect on editing. Interestingly, both the full length and truncated Cas13b exhibit very similar patterns of which position within the guide is optimal, but different orthologs exhibit slightly different patterns, though still relatively similar (FIGS. 108 and 109). In general, 50 bp guides seem to be slightly better for A to I editing. shown here, B1 and B12 (REPAIRv1) on the following two slides.

[0154] FIG. 108 is a graph showing Cas13b11 results with different guide RNAs.

[0155] FIG. 109 is a graph showing Cas13b12 (REPAIRv1) with different guide RNAs.

[0156] FIG. 110 is a graph showing results of Cas13b6-REPAIR targeting KRAS. In this figure, instead of moving the guide across a single editing site, the sequence of the guide is fixed and each guide RNA targets a different adenosine within the fixed sequence. Two sites were evaluated for both Cas13b6 and the Cas13b6CΔ300 truncation, with both 30 and 50 nucleotide guides as indicated in the schematic at the top (SEQ ID No. 918). Editing is evaluated by targeted next generation sequencing across the editing loci. Again, different target positions within the guide show different editing rates and patterns for both the full length and truncated Cas13b6s.

[0157] FIG. 111 is a graph depicting that localization tags may affect on-target editing. Different localization tags (both nuclear localization and nuclear export tags) with Cas13b6 seem to affect the ability of Cas13b6-REPAIR to recover luciferase activity, but does not appear to affect off-target activity appreciably. Red points are REPAIRv1 and REPAIRv2, which are with the Cas13b12 ortholog and using the HIV NES, blue points with Cas13b6 ortholog.

[0158] FIG. 112 is a graph showing results of RfxCas13d. Cas13d is a recently discovered class of Cas13 proteins that are on average smaller than Cas13b proteins. A characterized Cas13d ortholog known as RfxCas13d is tested in this figure for REPAIR activity using the same tiling guide scheme shown in FIG. 106. crRNA refers to mature CRISPR RNA and pre-crRNA refers to unprocessed version. Although most guide RNAs with RfxCas13d-REPAIR show no RNA editing activity, there are a few that seem to mediate relatively good editing when compared to existing systems shown in black.

[0159] FIG. 113 is a graph showing results of guide RNA-mediated editing with RfxCas13d. The data show that even without the RfxCas13d-REPAIR or even ADAR, the guide RNA (mismatch position 33) by itself is somehow able to mediate editing events (left-most condition), which is not the case with a Cas13b12 guide. Furthermore, it appears that the introduction of ADAR or RfxCas13d-REPAIR does not seem to have much effect on the editing mediated by this guide RNA.

[0160] FIG. 114 is a schematic illustrating the dual vector system design for evaluating RNA editing in cultures of primary rat cortical neurons.

[0161] FIG. 115 is a graph showing that up to 35% editing is achieved in neurons with dual vector system. Using two guides as indicated in the schematic at the top (SEQ ID No. 761, guide 1 has one base flip/targeted adenosine at the indicated position, while guide 2 has two targeted adenosine), REPAIR with B6/B11/B12 was packaged into AAV using the dual vector system in FIG. 114. Guide 2 was found to mediate up to 35% editing at A57 with B6-REPAIR (30% for B11-REPAIR) with targeted next generation sequencing 14 days after transduction with AAV, showing that AAV-delivered REPAIR can mediate RNA base editing in post-mitotic cell types.

[0162] FIG. 116 is a graph depicting that single vector AAV B6-REPAIR system is able to edit RNA in neuron cultures. Using the single vector system in FIG. 102 with the Cas13b6CΔ300 truncation, the guide that has two target adenosines in FIG. 115 was used, as well as a guide across the same sequence but only targeting A48 as indicated. 5 days after transduction with AAV, targeted next-generation sequencing shows approximately 6% editing with guide 2 at A24 (Same as A57 in FIG. 115), demonstrating the viability of the single vector approach.

[0163] FIG. 117 is a graph is a graph depicting that different Cas13b orthologs fused to ADAR.

[0164] FIG. 118 is a graph showing that V351G editing greatly increases REPAIR editing. The V351G mutation (pAB316) was introduced into the E488Q PspCas13b (Cas13b12) REPAIR construct (REPAIR v1, pAB0048) and tested for C-U activity on a gauss luciferase construct with a TCG motif (TCG). Editing was read out by next generation sequencing, revealing increased C-U activity.

[0165] FIG. 119 is a graph showing endogenous KRAS and PPIB targeting. The V351G mutation (pAB316) was introduced into the E488Q PspCas13b REPAIR construct (REPAIR v1, pAB0048) and tested for C-U activity on a gauss four sites, two in each gene, with different motifs. Editing was read out by next generation sequencing, revealing increased C-U activity.

[0166] FIG. 120 is a graph showing optimal V351G combination mutants. Selected sites (S486, G489) were mutagenized to all 20 possible residues and tested on a background of REPAIR[E488Q, V351G]. Constructs were tested on two luciferase motifs, TCG and GCG, and selected on the basis of luciferase activity.

[0167] FIG. 121 is a graph showing S486A and V351G combination C-to-U activity. S486A was tested against the [V351G, E488Q] background and the E488Q background on all four motifs, with luciferase activity as a readout. S486A performs better on all motifs, especially ACG and TCG.

[0168] FIG. 122 is a graph showing that S486A improves C-to-U editing across all motifs. S486A improves targeting over the [V351G, E488Q] background on all motifs, when measured by luciferase activity.

[0169] FIG. 123A is a graph showing S486 mutants C-to-U activity with both TCG and CCG targeting. FIG. 123B is a graph showing S486 mutants C-to-U activity with CCG targeting only. S486A was tested against the [V351G, E488Q] background and the E488Q background on all four motifs, with NGS as a readout. S486A performs better on all motifs, especially ACG and TCG.

[0170] FIG. 124 is a graph showing S486A A-to-I activity. The data shows that S486A mutations maintain A-to-I activity of the previous constructs when measured on a luciferase reporter.

[0171] FIG. 125 is a graph showing S486A A-to-I off-target activity. The data shows that S486A has comparable A-to-I off-target activity when measured on a luciferase reporter.

[0172] FIG. 126A is a graph showing that targeting by S486A/V351G/E488Q (pAB493), V351G/E488Q (pAB316), and E488Q (REPAIRv1) is comparable when read out by luciferase activity (Gluc/Cluc RLU). FIG. 126B is a graph showing that targeting by S486A/V351G/E488Q (pAB493), V351G/E488Q (pAB316), and E488Q (REPAIRv1) is comparable when assayed by NGS (fraction editing).

[0173] FIG. 127A is a graph showing S486A C-to-U activity by NGS on Cluc reporter constructs. FIG. 127B is a graph showing S486A C-to-U activity by NGS on endogenous gene PPIB.

[0174] FIG. 128 is a graph depicting identification of new T375 and K376 mutants. Selected sites (T375, K376) were mutagenized to all 20 possible residues and tested on a background of REPAIR[E488Q, V351G]. Constructs were tested on the TCG luciferase motif and selected on the basis of luciferase activity.

[0175] FIG. 129 is a graph showing that T375S has relaxed motif T375S was tested against the [S486A, V351G, E488Q] background (pAB493), [V351G, E488Q] background (pAB316), and the E488Q background (pAB48) on all TCG and GCG motifs, with luciferase activity as a readout. T375S improves GCG motif.

[0176] FIG. 130 is a graph showing that T375S has relaxed motif T375S was tested against the [S486A, V351G, E488Q] background (pAB493), [V351G, E488Q] background (pAB316), and the E488Q background (pAB48) on GCG motifs, with luciferase activity as a readout. T375S improves GCG motif.

[0177] FIG. 131 is a graph depicting that B6 and B11 orthologs show improved RESCUE activity. Cas13b orthologs Cas13b6 (RanCas13b) and Cas13b11 (PguCas13b) were tested with T375S mutation, and show improved activity as measured by luciferase assay. Mutations shows are on corresponding backgrounds (T375S=T375S/S486A/V351G/E448Q).

[0178] FIG. 132 is a graph showing that DNA2.0 vectors has comparable luciferase to transient transfection vectors. RESCUE vectors based off of either DNA2.0 (now Atum) constructs compared to a non-lenti vector, with Cas13b11 (PguCas13b) show improved luciferase activity. The Atum vector map (https://benchling.com/s/seq-DENgx9izDhsRTFFgy71K) has additional EES elements for expression. Mutations shows are on corresponding backgrounds (V351G=V351G/E448Q, S486A=S486A/V351G/E448Q).

[0179] FIG. 133A is a graph showing luciferase results of testing truncations validated by REPAIR (B6 Cdelta300) with RESCUE using 30 bp guides. FIG. 133B is a graph showing luciferase results of testing truncations validated by REPAIR (B6 Cdelta300) with RESCUE using 50 bp guides. The 26 mismatch distance (as measured by the 5′ end) shows the optimal activity with both full length and truncated versions).

[0180] FIG. 134A is a graph showing luciferase results of testing truncations validated by REPAIR (B11 Ndelta280) with RESCUE using 30 bp guides. FIG. 134B is a graph showing luciferase results of testing truncations validated by REPAIR (B11 Ndelta280) with RESCUE using 50 bp guides. The 26 mismatch distance (as measured by the 5′ end) shows the optimal activity with both full length and truncated versions).

[0181] FIG. 135 is a graph showing results of testing all B6 truncations. Iterative truncations were generated from the N and C termini on RanCas13b (B6), with the T375S/S486A/V351G/E448Q mutation, with optimal activity up to C-delta 200, and activity at C-delta 320. Truncations are tested on luciferase, and editing is read out as luciferase activity. Missing bars indicate no data. The pAB0642 is an untruncated N-term control, T375S/S486A/V351G/E448Q. The pAB0440 is an untruncated C-term control, E448Q. All N-term constructs, and pAB0642, have an mark NES linker. All C-term constructs, and pAB0440, have a HIV-NES linker.

[0182] FIG. 136 is a graph showing results of testing all B11 truncations. Iterative truncations were generated from the N and C termini on PguCas13b (11), with the T375S/S486A/V351G/E448Q mutation. Truncations are tested on luciferase, and editing is read out as luciferase activity.

[0183] FIG. 137A is a graph showing Beta catenin modulation with REPAIR/RESCUE as measured by Beta-catenin activity via the TCF-LEF RE Wnt pathway reporter (Promega). FIG. 137B is a graph showing Beta catenin modulation with REPAIR/RESCUE as measured by the M50 Super 8× TOPFlash reporter (Addgene). Beta-catenin/Wnt pathway induction is tested by using RNA editing to remove phosphorylation sites on Beta catenin. Guides targeting beta-catenin for either REPAIR (RanCas13b ortholog, E488Q mutation) or RESCUE (RanCas13b ortholog, T375S/S486A/V351G/E448Q mutation) were tested for phenotypic activity. The T41A guide shows activity on both reporters.

[0184] FIG. 138 is a graph showing NGS results of Beta catenin modulation. NGS readouts of either A-I (A) or C-U (C) activity at targeted sites by either REPAIR (RanCas13b ortholog, E488Q mutation) or RESCUE (RanCas13b ortholog, T375S/S486A/V351G/E448Q mutation. REPAIR was used on A targets, and RESCUE was used on C targets.

[0185] FIG. 139 is a graph depicting that tiling different guides shows improved motif activity at the 30_5 mutation (mismatch is 26 nt away from the 5′ of the guide). All four motifs were tested with various tiling guides for luciferase activity. Nomenclature corresponds to distance from the 3′ end of the spacer (i.e., 26 nt mismatch is 30_5). The 26 mismatch distance (as measured by the 5′ end) shows the optimal activity with most motifs. Guides were tested with RESCUE (RanCas13b ortholog, T375S/S486A/V351G/E448Q mutation.

[0186] FIG. 140A is a graph showing that REPAIR allows for editing residues associated with PTMs. FIG. 140B is a graph showing that RESCUE allows for editing residues associated with PTMs.

[0187] The appended claims are herein explicitly incorporated by reference.

[0188] The figures herein are for illustrative purposes only and are not necessarily drawn to scale.

### DETAILED DESCRIPTION

### General Definitions

[0189] Unless defined otherwise, technical and scientific terms used herein have the same meaning as commonly understood by one of ordinary skill in the art to which this disclosure pertains. Definitions of common terms and techniques in molecular biology may be found in Molecular Cloning: A Laboratory Manual, 2^{nd} edition (1989) (Sambrook, Fritsch, and Maniatis); Molecular Cloning: A Laboratory Manual, 4^{th} edition (2012) (Green and Sambrook); Current Protocols in Molecular Biology (1987) (F. M. Ausubel et al. eds.); the series Methods in Enzymology (Academic Press, Inc.): PCR 2: A Practical Approach (1995) (M. J. MacPherson, B. D. Hames, and G. R. Taylor eds.): Antibodies, A Laboraotry Manual (1988) (Harlow and Lane, eds.): Antibodies A Laboraotry Manual, 2^{nd} edition 2013 (E. A. Greenfield ed.); Animal Cell Culture (1987) (R. I. Freshney, ed.); Benjamin Lewin, Genes IX, published by Jones and Bartlet, 2008 (ISBN 0763752223); Kendrew et al. (eds.), The Encyclopedia of Molecular Biology, published by Blackwell Science Ltd., 1994 (ISBN 0632021829); Robert A. Meyers (ed.), Molecular Biology and Biotechnology: a Comprehensive Desk Reference, published by VCH Publishers, Inc., 1995 (ISBN 9780471185710); Singleton et al., Dictionary of Microbiology and Molecular Biology 2nd ed., J. Wiley & Sons (New York, N.Y. 1994), March, Advanced Organic Chemistry Reactions, Mechanisms and Structure 4th ed., John Wiley & Sons (New York, N.Y. 1992); and Marten H. Hofker and Jan van Deursen, Transgenic Mouse Methods and Protocols, 2nd edition (2011).

[0190] Reference is made to U.S. Provisional 62/351,662 and 62/351,803, filed on Jun. 17, 2016, U.S. Provisional 62/376,377, filed on Aug. 17, 2016, U.S. Provisional 62/410,366, filed Oct. 19, 2016, U.S. Provisional 62/432,240, filed Dec. 9, 2016, U.S. provisional 62/471,792 filed Mar. 15, 2017, and U.S. Provisional 62/484,786 filed Apr. 12, 2017. Reference is made to International PCT application PCT/US2017/038154, filed Jun. 19, 2017. Reference is made to U.S. Provisional 62/471,710, filed Mar. 15, 2017 (entitled, “Novel Cas13B Orthologues CRISPR Enzymes and Systems,” Attorney Ref: BI-10157 VP 47627.04.2149). Reference is further made to U.S. Provisional 62/432,553, filed Dec. 9, 2016, U.S. Provisional 62/456,645, filed Feb. 8, 2017, and U.S. Provisional 62/471,930, filed Mar. 15, 2017 (entitled “CRISPR Effector System Based Diagnostics,” Attorney Ref. BI-10121 BROD 0842P) and US Provisional To Be Assigned, filed Apr. 12, 2017 (entitled “CRISPR Effector System Based Diagnostics,” Attorney Ref. BI-10121 BROD 0843P)

[0191] As used herein, the singular forms “a”, “an”, and “the” include both singular and plural referents unless the context clearly dictates otherwise.

[0192] The term “optional” or “optionally” means that the subsequent described event, circumstance or substituent may or may not occur, and that the description includes instances where the event or circumstance occurs and instances where it does not.

[0193] The recitation of numerical ranges by endpoints includes all numbers and fractions subsumed within the respective ranges, as well as the recited endpoints.

[0194] The terms “about” or “approximately” as used herein when referring to a measurable value such as a parameter, an amount, a temporal duration, and the like, are meant to encompass variations of and from the specified value, such as variations of +/−10% or less, +/−5% or less, +/−1% or less, and +/−0.1% or less of and from the specified value, insofar such variations are appropriate to perform in the disclosed invention. It is to be understood that the value to which the modifier “about” or “approximately” refers is itself also specifically, and preferably, disclosed.

[0195] Reference throughout this specification to “one embodiment”, “an embodiment,” “an example embodiment,” means that a particular feature, structure or characteristic described in connection with the embodiment is included in at least one embodiment of the present invention. Thus, appearances of the phrases “in one embodiment,” “in an embodiment,” or “an example embodiment” in various places throughout this specification are not necessarily all referring to the same embodiment, but may. Furthermore, the particular features, structures or characteristics may be combined in any suitable manner, as would be apparent to a person skilled in the art from this disclosure, in one or more embodiments. Furthermore, while some embodiments described herein include some but not other features included in other embodiments, combinations of features of different embodiments are meant to be within the scope of the invention. For example, in the appended claims, any of the claimed embodiments can be used in any combination.

[0196] C2c2 is now known as Cas13a. It will be understood that the term “C2c2” herein is used interchangeably with “Cas13a”.

[0197] All publications, published patent documents, and patent applications cited herein are hereby incorporated by reference to the same extent as though each individual publication, published patent document, or patent application was specifically and individually indicated as being incorporated by reference.

[0198] Various embodiments are described hereinafter. It should be noted that the specific embodiments are not intended as an exhaustive description or as a limitation to the broader aspects discussed herein. One aspect described in conjunction with a particular embodiment is not necessarily limited to that embodiment and can be practiced with any other embodiment(s).

### Overview

[0199] The embodiments disclosed herein provide systems, constructs, and methods for targeted base editing. In general the systems disclosed herein comprise a targeting component and a base editing component. The targeting component functions to specifically target the base editing component to a target nucleotide sequence in which one or more nucleotides are to be edited. The base editing component may then catalyze a chemical reaction to convert a first nucleotide in the target sequence to a second nucleotide. For example, the base editor may catalyze conversion of an adenine such that it is read as guanine by a cell's transcription or translation macchinery, or vice versa. Likewise, the base editing component may catalyze conversion of cytidine to a uracil, or vice versa. In certain example embodiments, the base editor may be derived by starting with a known base editor, such as an adenine deaminase or cytodine deaminase, and modified using methods such as directed evolution to derive new functionalities. Directed evolution techniques are known in the art and may include those described in WO 2015/184016 “High-Throughput Assembly of Genetic Permuatations.” In will be understood that the present invention in certain aspects equally relates to deaminases per se as described herein and having undergone directed evolution, such as the mutated deaminases described herein elsewhere, as well as polynucleotides encoding such deaminases (including vectors and expression and/or delivery systems), as well as fusions between such mutated deaminases and targeting component, such as polynucleotide binding molecules or systems, as described herein elsewhere.

[0200] In one aspect the present invention provides methods for targeted deamination of adenine or cytodine in RNA or DNA by an adenosine deaminase or modified variant thereof. According to the methods of the invention, the adenosine deaminase (AD) protein is recruited specifically to the nucleic acid to be modified. The term “AD functionalized compositions” refers to the engineered compositions for site directed base editing disclosed herein, comprising a targeting domain complexed to an adenosine deaminase, or catalytic domain thereof.

[0201] In particular embodiments of the methods of the present invention, recruitment of the adenosine deaminase to the target locus is ensured by fusing the adenosine deaminase or catalytic domain thereof to the targeting domain. Methods of generating a fusion protein from two separate proteins are known in the art and typically involve the use of spacers or linkers. The target domain can be fused to the adenosine deaminase protein or catalytic domain thereof on either the N- or C-terminal end thereof.

[0202] The term “linker” as used in reference to a fusion protein refers to a molecule which joins the proteins to form a fusion protein. Generally, such molecules have no specific biological activity other than to join or to preserve some minimum distance or other spatial relationship between the proteins. However, in certain embodiments, the linker may be selected to influence some property of the linker and/or the fusion protein such as the folding, net charge, or hydrophobicity of the linker.

[0203] Suitable linkers for use in the methods of the present invention are well known to those of skill in the art and include, but are not limited to, straight or branched-chain carbon linkers, heterocyclic carbon linkers, or peptide linkers. However, as used herein the linker may also be a covalent bond (carbon-carbon bond or carbon-heteroatom bond). In particular embodiments, the linker is used to separate the targeting domain and the adenosine deaminase by a distance sufficient to ensure that each protein retains its required functional property. Preferred peptide linker sequences adopt a flexible extended conformation and do not exhibit a propensity for developing an ordered secondary structure. In certain embodiments, the linker can be a chemical moiety which can be monomeric, dimeric, multimeric or polymeric. Preferably, the linker comprises amino acids. Typical amino acids in flexible linkers include Gly, Asn and Ser. Accordingly, in particular embodiments, the linker comprises a combination of one or more of Gly, Asn and Ser amino acids. Other near neutral amino acids, such as Thr and Ala, also may be used in the linker sequence. Exemplary linkers are disclosed in Maratea et al. (1985), Gene 40: 39-46; Murphy et al. (1986) Proc. Nat'l. Acad. Sci. USA 83: 8258-62; U.S. Pat. Nos. 4,935,233; and 4,751,180. For example, GlySer linkers GGS, GGGS or GSG can be used. GGS, GSG, GGGS or GGGGS linkers can be used in repeats of 3 (such as (GGS)3 (SEQ ID No. 12), (GGGGS)3) or 5, 6, 7, 9 or even 12 (SEQ ID No. 13) or more, to provide suitable lengths. In particular embodiments, linkers such as (GGGGS)3 are preferably used herein. (GGGGS)6 (GGGGS)9 or (GGGGS)12 may preferably be used as alternatives. Other preferred alternatives are (GGGGS)1 (SEQ ID No 14), (GGGGS)2 (SEQ ID No. 15), (GGGGS)4, (GGGGS)5, (GGGGS)7, (GGGGS)8, (GGGGS)10, or (GGGGS)11. In yet a further embodiment, LEPGEKPYKCPECGKSFSQSGALTRHQRTHTR (SEQ ID No:11) is used as a linker. In yet an additional embodiment, the linker is XTEN linker (SEQ ID No. 761). The invention also relates to a method for treating or preventing a disease by the targeted deamination or a disease causing variant using the AD-functionalized compositions. For example, the deamination of an A, may remedy a disease caused by transcripts containing a pathogenic G→A or C→T point mutation. Examples of disease that can be treated or prevented with the present invention include cancer, Meier-Gorlin syndrome, Seckel syndrome 4, Joubert syndrome 5, Leber congenital amaurosis 10; Charcot-Marie-Tooth disease, type 2; Charcot-Marie-Tooth disease, type 2; Usher syndrome, type 2C; Spinocerebellar ataxia 28; Spinocerebellar ataxia 28; Spinocerebellar ataxia 28; Long QT syndrome 2; Sjgren-Larsson syndrome; Hereditary fructosuria; Hereditary fructosuria; Neuroblastoma; Neuroblastoma; Kallmann syndrome 1; Kallmann syndrome 1; Kallmann syndrome 1; Metachromatic leukodystrophy.

[0204] In particular embodiments, the invention thus comprises compositions for use in therapy. This implies that the methods can be performed in vivo, ex vivo or in vitro. In particular embodiments, the methods are not methods of treatment of the animal or human body or a method for modifying the germ line genetic identity of a human cell. In particular embodiments; when carrying out the method, the target RNA is not comprised within a human or animal cell. In particular embodiments, when the target is a human or animal target, the method is carried out ex vivo or in vitro.

[0205] The invention also relates to a method for knocking-out or knocking-down an undesirable activity of a gene, wherein the deamination of an A or C at the transcript of the gene results in a loss of function. For example, in one embodiment, the targeted deamination by the AD-functionalized CRISPR system can cause a nonsense mutation resulting in a premature stop codon in an endogenous gene. This may alter the expression of the endogenous gene and can lead to a desirable trait in the edited cell. In another embodiment, the targeted deamination by the AD-functionalized compositions can cause a nonconservative missense mutation resulting in a code for a different amino acid residue in an endogenous gene. This may alter the function of the endogenous gene expressed and can also lead to a desirable trait in the edited cell.

[0206] The invention also relates to a modified cell obtained by the targeted deamination using the AD-functionalized composition, or progeny thereof, wherein the modified cell comprises an I or G in replace of the A, or a T in replace of the C in the target RNA sequence of interest compared to a corresponding cell before the targeted deamination. The modified cell can be a eukaryotic cell, such as an animal cell, a plant cell, an mammalian cell, or a human cell.

[0207] In some embodiments, the modified cell is a therapeutic T cell, such as a T cell sutiable for CAR-T therapies. The modification may result in one or more desirable traits in the therapeutic T cell, including but not limited to, reduced expression of an immune checkpoint receptor (e.g., PDA, CTLA4), reduced expression of HLA proteins (e.g., B2M, HLA-A), and reduced expression of an endogenous TCR.

[0208] In some embodiments, the modified cell is an antibody-producing B cell. The modification may results in one or more desirable traits in the B cell, including but not limited to, enhanced antibody production.

[0209] The invention also relates to a modified non-human animal or a modified plant. The modified non-human animal can be a farm animal. The modified plant can be an agricultural crop.

[0210] The invention further relates to a method for cell therapy, comprising administering to a patient in need thereof the modified cell described herein, wherein the presence of the modified cell remedies a disease in the patient. In one embodiment, the modified cell for cell therapy is a CAR-T cell capable of recognizing and/or attacking a tumor cell. In another embodiment, the modified cell for cell therapy is a stem cell, such as a neural stem cell, a mesenchymal stem cell, a hematopoietic stem cell, or an iPSC cell.

[0211] The invention additionally relates to an engineered, non-naturally occurring system suitable for modifying an Adenine or Cytodine in a target locus of interest, comprising: a targeteting domain; an adenosine deaminase protein or catalytic domain thereof, or one or more nucleotide sequences encoding; wherein the adenosine deaminase protein or catalytic domain thereof is covalently or non-covalently linked to the targeting domain or is adapted to link thereto after delivery; wherein the targeting domain is capable of hybridizing with a target sequence comprising an Adenine or Cytidine within an RNA or DNA polynucleotide of interest.

[0212] The invention additionally relates to an engineered, non-naturally occurring vector system suitable for modifying an Adenine or Cytodine in a target locus of interest, comprising one or more vectors comprising: (a) a first regulatory element operably linked to one or more nucleotide sequences encoding encoding a targeting domain; and (b) optionally a nucleotide sequence encoding an adenosine deaminase protein or catalytic domain thereof which is under control of the first or operably linked to a second regulatory element; wherein, if the nucleotide sequence encoding an adenosine deaminase protein or catalytic domain thereof is operably linked to a second regulatory element, the adenosine deaminase protein or catalytic domain thereof is adapted to link to the targeting domain after expression; wherein the targeting domain is capable of hybridizing with a target sequence comprising an Adenine or Cytodine within the target locus; wherein components (a) and (b) are located on the same or different vectors of the system.

[0213] The invention additionally relates to in vitro, ex vivo or in vivo host cell or cell line or progeny thereof comprising the engineered, non-naturally occurring system or vector system described herein. The host cell can be a eukaryotic cell, such as an animal cell, a plant cell, an mammalian cell, or a human cell.

### Adenosine Deaminase

[0214] The term “adenosine deaminase” or “adenosine deaminase protein” as used herein refers to a protein, a polypeptide, or one or more functional domain(s) of a protein or a polypeptide that is capable of catalyzing a hydrolytic deamination reaction that converts an adenine (or an adenine moiety of a molecule) to a hypoxanthine (or a hypoxanthine moiety of a molecule), as shown below. In some embodiments, the adenine-containing molecule is an adenosine (A), and the hypoxanthine-containing molecule is an inosine (I). The adenine-containing molecule can be deoxyribonucleic acid (DNA) or ribonucleic acid (RNA).

[chemical structure]

[0215] According to the present disclosure, adenosine deaminases that can be used in connection with the present disclosure include, but are not limited to, members of the enzyme family known as adenosine deaminases that act on RNA (ADARs), members of the enzyme family known as adenosine deaminases that act on tRNA (ADATs), and other adenosine deaminase domain-containing (ADAD) family members. According to the present disclosure, the adenosine deaminase is capable of targeting adenine in a RNA/DNA and RNA duplexes. Indeed, Zheng et al. (Nucleic Acids Res. 2017, 45(6): 3369-3377) demonstrate that ADARs can cary out adenosine to inosine editing reactions on RNA/DNA and RNA/RNA duplexes. In particular embodiments, the adenosine deaminase has been modified to increase its ability to edit DNA in a RNA/DNAn RNA duplex as detailed herein below.

[0216] In some embodiments, the adenosine deaminase is derived from one or more metazoa species, including but not limited to, mammals, birds, frogs, squids, fish, flies and worms. In some embodiments, the adenosine deaminase is a human, squid or Drosophila adenosine deaminase.

[0217] In some embodiments, the adenosine deaminase is a human ADAR, including hADAR, hADAR2, hADAR3. In some embodiments, the adenosine deaminase is a Caenorhabditis elegans ADAR protein, including ADR-1 and ADR-2. In some embodiments, the adenosine deaminase is a Drosophila ADAR protein, including dAdar. In some embodiments, the adenosine deaminase is a squid Loligo pealeii ADAR protein, including sqADAR2a and sqADAR2b. In some embodiments, the adenosine deaminase is a human ADAT protein. In some embodiments, the adenosine deaminase is a Drosophila ADAT protein. In some embodiments, the adenosine deaminase is a human ADAD protein, including TENR (hADADI) and TENRL (hADAD2).

[0218] In some embodiments, the adenosine deaminase is a TadA protein such as E. coli TadA. See Kim et al., Biochemistry 45:6407-6416 (2006); Wolf et al., EMBO J. 21:3841-3851 (2002). In some embodiments, the adenosine deaminase is mouse ADA. See Grunebaum et al., Curr. Opin. Allergy Clin. Immunol. 13:630-638 (2013). In some embodiments, the adenosine deaminase is human ADAT2. See Fukui et al., J. Nucleic Acids 2010:260512 (2010).

[0219] In some embodiments, the adenosine deaminase protein recognizes and converts one or more target adenosine residue(s) in a double-stranded nucleic acid substrate into inosine residues (s). In some embodiments, the double-stranded nucleic acid substrate is a RNA-DNA hybrid duplex. In some embodiments, the adenosine deaminase protein recognizes a binding window on the double-stranded substrate. In some embodiments, the binding window contains at least one target adenosine residue(s). In some embodiments, the binding window is in the range of about 3 bp to about 100 bp. In some embodiments, the binding window is in the range of about 5 bp to about 50 bp. In some embodiments, the binding window is in the range of about 10 bp to about 30 bp. In some embodiments, the binding window is about 1 bp, 2 bp, 3 bp, 5 bp, 7 bp, 10 bp, 15 bp, 20 bp, 25 bp, 30 bp, 40 bp, 45 bp, 50 bp, 55 bp, 60 bp, 65 bp, 70 bp, 75 bp, 80 bp, 85 bp, 90 bp, 95 bp, or 100 bp.

[0220] In some embodiments, the adenosine deaminase protein comprises one or more deaminase domains. Not intended to be bound by a particular theory, it is contemplated that the deaminase domain functions to recognize and convert one or more target adenosine (A) residue(s) contained in a double-stranded nucleic acid substrate into inosine (I) residue(s). In some embodiments, the deaminase domain comprises an active center. In some embodiments, the active center comprises a zinc ion. In some embodiments, during the A-to-I editing process, base pairing at the target adenosine residue is disrupted, and the target adenosine residue is “flipped” out of the double helix to become accessible by the adenosine deaminase. In some embodiments, amino acid residues in or near the active center interact with one or more nucleotide(s) 5′ to a target adenosine residue. In some embodiments, amino acid residues in or near the active center interact with one or more nucleotide(s) 3′ to a target adenosine residue. In some embodiments, amino acid residues in or near the active center further interact with the nucleotide complementary to the target adenosine residue on the opposite strand. In some embodiments, the amino acid residues form hydrogen bonds with the 2′ hydroxyl group of the nucleotides.

[0221] In some embodiments, the adenosine deaminase comprises human ADAR2 full protein (hADAR2) or the deaminase domain thereof (hADAR2-D). In some embodiments, the adenosine deaminase is an ADAR family member that is homologous to hADAR2 or hADAR2-D.

[0222] Particularly, in some embodiments, the homologous ADAR protein is human ADAR1 (hADAR1) or the deaminase domain thereof (hADAR1-D). In some embodiments, glycine 1007 of hADAR1-D corresponds to glycine 487 hADAR2-D, and glutamic Acid 1008 of hADAR1-D corresponds to glutamic acid 488 of hADAR2-D.

[0223] In some embodiments, the adenosine deaminase comprises the wild-type amino acid sequence of hADAR2-D. In some embodiments, the adenosine deaminase comprises one or more mutations in the hADAR2-D sequence, such that the editing efficiency, and/or substrate editing preference of hADAR2-D is changed according to specific needs.

[0224] Certain mutations of hADAR1 and hADAR2 proteins have been described in Kuttan et al., Proc Natl Acad Sci USA. (2012) 109(48):E3295-304; Want et al. ACS Chem Biol. (2015) 10(11):2512-9; and Zheng et al. Nucleic Acids Res. (2017) 45(6):3369-337, each of which is incorporated herein by reference in its entirety.

[0225] In some embodiments, the adenosine deaminase comprises a mutation at glycine336 of the hADAR2-D amino acid sequence, or a corresponding position in a homologous ADAR protein. In some embodiments, the glycine residue at position 336 is replaced by an aspartic acid residue (G336D).

[0226] In some embodiments, the adenosine deaminase comprises a mutation at Glycine487 of the hADAR2-D amino acid sequence, or a corresponding position in a homologous ADAR protein. In some embodiments, the glycine residue at position 487 is replaced by a non-polar amino acid residue with relatively small side chains. For example, in some embodiments, the glycine residue at position 487 is replaced by an alanine residue (G487A). In some embodiments, the glycine residue at position 487 is replaced by a valine residue (G487V). In some embodiments, the glycine residue at position 487 is replaced by an amino acid residue with relatively large side chains. In some embodiments, the glycine residue at position 487 is replaced by a arginine residue (G487R). In some embodiments, the glycine residue at position 487 is replaced by a lysine residue (G487K). In some embodiments, the glycine residue at position 487 is replaced by a tryptophan residue (G487W). In some embodiments, the glycine residue at position 487 is replaced by a tyrosine residue (G487Y).

[0227] In some embodiments, the adenosine deaminase comprises a mutation at glutamic acid488 of the hADAR2-D amino acid sequence, or a corresponding position in a homologous ADAR protein. In some embodiments, the glutamic acid residue at position 488 is replaced by a glutamine residue (E488Q). In some embodiments, the glutamic acid residue at position 488 is replaced by a histidine residue (E488H). In some embodiments, the glutamic acid residue at position 488 is replace by an arginine residue (E488R). In some embodiments, the glutamic acid residue at position 488 is replace by a lysine residue (E488K). In some embodiments, the glutamic acid residue at position 488 is replace by an asparagine residue (E488N). In some embodiments, the glutamic acid residue at position 488 is replace by an alanine residue (E488A). In some embodiments, the glutamic acid residue at position 488 is replace by a Methionine residue (E488M). In some embodiments, the glutamic acid residue at position 488 is replace by a serine residue (E488S). In some embodiments, the glutamic acid residue at position 488 is replace by a phenylalanine residue (E488F). In some embodiments, the glutamic acid residue at position 488 is replace by a lysine residue (E488L). In some embodiments, the glutamic acid residue at position 488 is replace by a tryptophan residue (E488W).

[0228] In some embodiments, the adenosine deaminase comprises a mutation at threonine490 of the hADAR2-D amino acid sequence, or a corresponding position in a homologous ADAR protein. In some embodiments, the threonine residue at position 490 is replaced by a cysteine residue (T490C). In some embodiments, the threonine residue at position 490 is replaced by a serine residue (T490S). In some embodiments, the threonine residue at position 490 is replaced by an alanine residue (T490A). In some embodiments, the threonine residue at position 490 is replaced by a phenylalanine residue (T490F). In some embodiments, the threonine residue at position 490 is replaced by a tyrosine residue (T490Y). In some embodiments, the threonine residue at position 490 is replaced by a serine residue (T490R). In some embodiments, the threonine residue at position 490 is replaced by an alanine residue (T490K). In some embodiments, the threonine residue at position 490 is replaced by a phenylalanine residue (T490P). In some embodiments, the threonine residue at position 490 is replaced by a tyrosine residue (T490E).

[0229] In some embodiments, the adenosine deaminase comprises a mutation at valine493 of the hADAR2-D amino acid sequence, or a corresponding position in a homologous ADAR protein. In some embodiments, the valine residue at position 493 is replaced by an alanine residue (V493A). In some embodiments, the valine residue at position 493 is replaced by a serine residue (V493S). In some embodiments, the valine residue at position 493 is replaced by a threonine residue (V493T). In some embodiments, the valine residue at position 493 is replaced by an arginine residue (V493R). In some embodiments, the valine residue at position 493 is replaced by an aspartic acid residue (V493D). In some embodiments, the valine residue at position 493 is replaced by a proline residue (V493P). In some embodiments, the valine residue at position 493 is replaced by a glycine residue (V493G).

[0230] In some embodiments, the adenosine deaminase comprises a mutation at alanine589 of the hADAR2-D amino acid sequence, or a corresponding position in a homologous ADAR protein. In some embodiments, the alanine residue at position 589 is replaced by a valine residue (A589V).

[0231] In some embodiments, the adenosine deaminase comprises a mutation at asparagine597 of the hADAR2-D amino acid sequence, or a corresponding position in a homologous ADAR protein. In some embodiments, the asparagine residue at position 597 is replaced by a lysine residue (N597K). In some embodiments, the adenosine deaminase comprises a mutation at position 597 of the amino acid sequence, which has an asparagine residue in the wild type sequence. In some embodiments, the asparagine residue at position 597 is replaced by an arginine residue (N597R). In some embodiments, the adenosine deaminase comprises a mutation at position 597 of the amino acid sequence, which has an asparagine residue in the wild type sequence. In some embodiments, the asparagine residue at position 597 is replaced by an alanine residue (N597A). In some embodiments, the adenosine deaminase comprises a mutation at position 597 of the amino acid sequence, which has an asparagine residue in the wild type sequence. In some embodiments, the asparagine residue at position 597 is replaced by a glutamic acid residue (N597E). In some embodiments, the adenosine deaminase comprises a mutation at position 597 of the amino acid sequence, which has an asparagine residue in the wild type sequence. In some embodiments, the asparagine residue at position 597 is replaced by a histidine residue (N597H). In some embodiments, the adenosine deaminase comprises a mutation at position 597 of the amino acid sequence, which has an asparagine residue in the wild type sequence. In some embodiments, the asparagine residue at position 597 is replaced by a glycine residue (N597G). In some embodiments, the adenosine deaminase comprises a mutation at position 597 of the amino acid sequence, which has an asparagine residue in the wild type sequence. In some embodiments, the asparagine residue at position 597 is replaced by a tyrosine residue (N597Y). In some embodiments, the asparagine residue at position 597 is replaced by a phenylalanine residue (N597F). In some embodiments, the adenosine deaminase comprises mutation N597I. In some embodiments, the adenosine deaminase comprises mutation N597L. In some embodiments, the adenosine deaminase comprises mutation N597V. In some embodiments, the adenosine deaminase comprises mutation N597M. In some embodiments, the adenosine deaminase comprises mutation N597C. In some embodiments, the adenosine deaminase comprises mutation N597P. In some embodiments, the adenosine deaminase comprises mutation N597T. In some embodiments, the adenosine deaminase comprises mutation N597S. In some embodiments, the adenosine deaminase comprises mutation N597W. In some embodiments, the adenosine deaminase comprises mutation N597Q. In some embodiments, the adenosine deaminase comprises mutation N597D. In certain example embodiments, the mutations at N597 described above are further made in the context of an E488Q background

[0232] In some embodiments, the adenosine deaminase comprises a mutation at serine599 of the hADAR2-D amino acid sequence, or a corresponding position in a homologous ADAR protein. In some embodiments, the serine residue at position 599 is replaced by a threonine residue (S599T).

[0233] In some embodiments, the adenosine deaminase comprises a mutation at asparagine613 of the hADAR2-D amino acid sequence, or a corresponding position in a homologous ADAR protein. In some embodiments, the asparagine residue at position 613 is replaced by a lysine residue (N613K). In some embodiments, the adenosine deaminase comprises a mutation at position 613 of the amino acid sequence, which has an asparagine residue in the wild type sequence. In some embodiments, the asparagine residue at position 613 is replaced by an arginine residue (N613R). In some embodiments, the adenosine deaminase comprises a mutation at position 613 of the amino acid sequence, which has an asparagine residue in the wild type sequence. In some embodiments, the asparagine residue at position 613 is replaced by an alanine residue (N613A) In some embodiments, the adenosine deaminase comprises a mutation at position 613 of the amino acid sequence, which has an asparagine residue in the wild type sequence. In some embodiments, the asparagine residue at position 613 is replaced by a glutamic acid residue (N613E). In some embodiments, the adenosine deaminase comprises mutation N613I. In some embodiments, the adenosine deaminase comprises mutation N613L. In some embodiments, the adenosine deaminase comprises mutation N613V. In some embodiments, the adenosine deaminase comprises mutation N613F. In some embodiments, the adenosine deaminase comprises mutation N613M. In some embodiments, the adenosine deaminase comprises mutation N613C. In some embodiments, the adenosine deaminase comprises mutation N613G. In some embodiments, the adenosine deaminase comprises mutation N613P. In some embodiments, the adenosine deaminase comprises mutation N613T. In some embodiments, the adenosine deaminase comprises mutation N613S. In some embodiments, the adenosine deaminase comprises mutation N613Y. In some embodiments, the adenosine deaminase comprises mutation N613W. In some embodiments, the adenosine deaminase comprises mutation N613Q. In some embodiments, the adenosine deaminase comprises mutation N613H. In some embodiments, the adenosine deaminase comprises mutation N613D. In some embodiments, the mutations at N613 described above are further made in combination with a E488Q mutation.

[0234] In some embodiments, to improve editing efficiency, the adenosine deaminase may comprise one or more of the mutations: G336D, G487A, G487V, E488Q, E488H, E488R, E488N, E488A, E488S, E488M, T490C, T490S, V493T, V493S, V493A, V493R, V493D, V493P, V493G, N597K, N597R, N597A, N597E, N597H, N597G, N597Y, A589V, S599T, N613K, N613R, N613A, N613E, based on amino acid sequence positions of hADAR2-D, and mutations in a homologous ADAR protein corresponding to the above.

[0235] In some embodiments, to reduce editing efficiency, the adenosine deaminase may comprise one or more of the mutations: E488F, E488L, E488W, T490A, T490F, T490Y, T490R, T490K, T490P, T490E, N597F, based on amino acid sequence positions of hADAR2-D, and mutations in a homologous ADAR protein corresponding to the above. In particular embodiments, it can be of interest to use an adenosine deaminase enzyme with reduced efficicay to reduce off-target effects.

[0236] In some embodiments, to reduce off-target effects, the adenosine deaminase comprises one or more of mutations at R348, V351, T375, K376, E396, C451, R455, N473, R474, K475, R477, R481, S486, E488, T490, S495, R510, based on amino acid sequence positions of hADAR2-D, and mutations in a homologous ADAR protein corresponding to the above. In some embodiments, the adenosine deaminase comprises mutation at E488 and one or more additional positions selected from R348, V351, T375, K376, E396, C451, R455, N473, R474, K475, R477, R481, S486, T490, S495, R510. In some embodiments, the adenosine deaminase comprises mutation at T375, and optionally at one or more additional positions. In some embodiments, the adenosine deaminase comprises mutation at N473, and optionally at one or more additional positions. In some embodiments, the adenosine deaminase comprises mutation at V351, and optionally at one or more additional positions. In some embodiments, the adenosine deaminase comprises mutation at E488 and T375, and optionally at one or more additional positions. In some embodiments, the adenosine deaminase comprises mutation at E488 and N473, and optionally at one or more additional positions. In some embodiments, the adenosine deaminase comprises mutation E488 and V351, and optionally at one or more additional positions. In some embodiments, the adenosine deaminase comprises mutation at E488 and one or more of T375, N473, and V351.

[0237] In some embodiments, to reduce off-target effects, the adenosine deaminase comprises one or more of mutations selected from R348E, V351L, T375G, T375S, R455G, R455S, R455E, N473D, R474E, K475Q, R477E, R481E, S486T, E488Q, T490A, T490S, S495T, and R510E, based on amino acid sequence positions of hADAR2-D, and mutations in a homologous ADAR protein corresponding to the above. In some embodiments, the adenosine deaminase comprises mutation E488Q and one or more additional mutations selected from R348E, V351L, T375G, T375S, R455G, R455S, R455E, N473D, R474E, K475Q, R477E, R481E, S486T, T490A, T490S, S495T, and R510E. In some embodiments, the adenosine deaminase comprises mutation T375G or T375S, and optionally one or more additional mutations. In some embodiments, the adenosine deaminase comprises mutation N473D, and optionally one or more additional mutations. In some embodiments, the adenosine deaminase comprises mutation V351L, and optionally one or more additional mutations. In some embodiments, the adenosine deaminase comprises mutation E488Q, and T375G or T375G, and optionally one or more additional mutations. In some embodiments, the adenosine deaminase comprises mutation E488Q and N473D, and optionally one or more additional mutations. In some embodiments, the adenosine deaminase comprises mutation E488Q and V351L, and optionally one or more additional mutations. In some embodiments, the adenosine deaminase comprises mutation E488Q and one or more of T375G/S, N473D and V351L.

[0238] Crystal structures of the human ADAR2 deaminase domain bound to duplex RNA reveal a protein loop that binds the RNA on the 5′ side of the modification site. This 5′ binding loop is one contributor to substrate specificity differences between ADAR family members. See Wang et al., Nucleic Acids Res., 44(20):9872-9880 (2016), the content of which is incorporated herein by reference in its entirety. In addition, an ADAR2-specific RNA-binding loop was identified near the enzyme active site. See Mathews et al., Nat. Struct. Mol. Biol., 23(5):426-33 (2016), the content of which is incorporated herein by reference in its entirety. In some embodiments, the adenosine deaminase comprises one or more mutations in the RNA binding loop to improve editing specificity and/or efficiency.

[0239] In some embodiments, the adenosine deaminase comprises a mutation at alanine454 of the hADAR2-D amino acid sequence, or a corresponding position in a homologous ADAR protein. In some embodiments, the alanine residue at position 454 is replaced by a serine residue (A454S). In some embodiments, the alanine residue at position 454 is replaced by a cysteine residue (A454C). In some embodiments, the alanine residue at position 454 is replaced by an aspartic acid residue (A454D).

[0240] In some embodiments, the adenosine deaminase comprises a mutation at arginine455 of the hADAR2-D amino acid sequence, or a corresponding position in a homologous ADAR protein. In some embodiments, the arginine residue at position 455 is replaced by an alanine residue (R455A). In some embodiments, the arginine residue at position 455 is replaced by a valine residue (R455V). In some embodiments, the arginine residue at position 455 is replaced by a histidine residue (R455H). In some embodiments, the arginine residue at position 455 is replaced by a glycine residue (R455G). In some embodiments, the arginine residue at position 455 is replaced by a serine residue (R455S). In some embodiments, the arginine residue at position 455 is replaced by a glutamic acid residue (R455E). In some embodiments, the adenosine deaminase comprises mutation R455C. In some embodiments, the adenosine deaminase comprises mutation R455I. In some embodiments, the adenosine deaminase comprises mutation R455K. In some embodiments, the adenosine deaminase comprises mutation R455L. In some embodiments, the adenosine deaminase comprises mutation R455M. In some embodiments, the adenosine deaminase comprises mutation R455N. In some embodiments, the adenosine deaminase comprises mutation R455Q. In some embodiments, the adenosine deaminase comprises mutation R455F. In some embodiments, the adenosine deaminase comprises mutation R455W. In some embodiments, the adenosine deaminase comprises mutation R455P. In some embodiments, the adenosine deaminase comprises mutation R455Y. In some embodiments, the adenosine deaminase comprises mutation R455E. In some embodiments, the adenosine deaminase comprises mutation R455D. In some embodiments, the mutations at at R455 described above are further made in combination with a E488Q mutation.

[0241] In some embodiments, the adenosine deaminase comprises a mutation at isoleucine456 of the hADAR2-D amino acid sequence, or a corresponding position in a homologous ADAR protein. In some embodiments, the isoleucine residue at position 456 is replaced by a valine residue (I456V). In some embodiments, the isoleucine residue at position 456 is replaced by a leucine residue (I456L). In some embodiments, the isoleucine residue at position 456 is replaced by an aspartic acid residue (I456D).

[0242] In some embodiments, the adenosine deaminase comprises a mutation at phenylalanine457 of the hADAR2-D amino acid sequence, or a corresponding position in a homologous ADAR protein. In some embodiments, the phenylalanine residue at position 457 is replaced by a tyrosine residue (F457Y). In some embodiments, the phenylalanine residue at position 457 is replaced by an arginine residue (F457R). In some embodiments, the phenylalanine residue at position 457 is replaced by a glutamic acid residue (F457E).

[0243] In some embodiments, the adenosine deaminase comprises a mutation at serine458 of the hADAR2-D amino acid sequence, or a corresponding position in a homologous ADAR protein. In some embodiments, the serine residue at position 458 is replaced by a valine residue (S458V). In some embodiments, the serine residue at position 458 is replaced by a phenylalanine residue (S458F). In some embodiments, the serine residue at position 458 is replaced by a proline residue (S458P). In some embodiments, the adenosine deaminase comprises mutation S458I. In some embodiments, the adenosine deaminase comprises mutation S458L. In some embodiments, the adenosine deaminase comprises mutation S458M. In some embodiments, the adenosine deaminase comprises mutation S458C. In some embodiments, the adenosine deaminase comprises mutation S458A. In some embodiments, the adenosine deaminase comprises mutation S458G. In some embodiments, the adenosine deaminase comprises mutation S458T. In some embodiments, the adenosine deaminase comprises mutation S458Y. In some embodiments, the adenosine deaminase comprises mutation S458W. In some embodiments, the adenosine deaminase comprises mutation S458Q. In some embodiments, the adenosine deaminase comprises mutation S458N. In some embodiments, the adenosine deaminase comprises mutation S458H. In some embodiments, the adenosine deaminase comprises mutation S458E. In some embodiments, the adenosine deaminase comprises mutation S458D. In some embodiments, the adenosine deaminase comprises mutation S458K. In some embodiments, the adenosine deaminase comprises mutation S458R. In some embodiments, the mutations at S458 described above are further made in combination with a E488Q mutation.

[0244] In some embodiments, the adenosine deaminase comprises a mutation at proline459 of the hADAR2-D amino acid sequence, or a corresponding position in a homologous ADAR protein. In some embodiments, the proline residue at position 459 is replaced by a cysteine residue (P459C). In some embodiments, the proline residue at position 459 is replaced by a histidine residue (P459H). In some embodiments, the proline residue at position 459 is replaced by a tryptophan residue (P459W).

[0245] In some embodiments, the adenosine deaminase comprises a mutation at histidine460 of the hADAR2-D amino acid sequence, or a corresponding position in a homologous ADAR protein. In some embodiments, the histidine residue at position 460 is replaced by an arginine residue (H460R). In some embodiments, the histidine residue at position 460 is replaced by an isoleucine residue (H460I). In some embodiments, the histidine residue at position 460 is replaced by a proline residue (H460P). In some embodiments, the adenosine deaminase comprises mutation H460L. In some embodiments, the adenosine deaminase comprises mutation H460V. In some embodiments, the adenosine deaminase comprises mutation H460F. In some embodiments, the adenosine deaminase comprises mutation H460M. In some embodiments, the adenosine deaminase comprises mutation H460C. In some embodiments, the adenosine deaminase comprises mutation H460A. In some embodiments, the adenosine deaminase comprises mutation H460G. In some embodiments, the adenosine deaminase comprises mutation H460T. In some embodiments, the adenosine deaminase comprises mutation H460S. In some embodiments, the adenosine deaminase comprises mutation H460Y. In some embodiments, the adenosine deaminase comprises mutation H460W. In some embodiments, the adenosine deaminase comprises mutation H460Q. In some embodiments, the adenosine deaminase comprises mutation H460N. In some embodiments, the adenosine deaminase comprises mutation H460E. In some embodiments, the adenosine deaminase comprises mutation H460D. In some embodiments, the adenosine deaminase comprises mutation H460K. In some embodiments, the mutations at H460 described above are further made in combination with a E488Q mutation.

[0246] In some embodiments, the adenosine deaminase comprises a mutation at proline462 of the hADAR2-D amino acid sequence, or a corresponding position in a homologous ADAR protein. In some embodiments, the proline residue at position 462 is replaced by a serine residue (P462S). In some embodiments, the proline residue at position 462 is replaced by a tryptophan residue (P462W). In some embodiments, the proline residue at position 462 is replaced by a glutamic acid residue (P462E).

[0247] In some embodiments, the adenosine deaminase comprises a mutation at aspartic acid469 of the hADAR2-D amino acid sequence, or a corresponding position in a homologous ADAR protein. In some embodiments, the aspartic acid residue at position 469 is replaced by a glutamine residue (D469Q). In some embodiments, the aspartic acid residue at position 469 is replaced by a serine residue (D469S). In some embodiments, the aspartic acid residue at position 469 is replaced by a tyrosine residue (D469Y).

[0248] In some embodiments, the adenosine deaminase comprises a mutation at arginine470 of the hADAR2-D amino acid sequence, or a corresponding position in a homologous ADAR protein. In some embodiments, the arginine residue at position 470 is replaced by an alanine residue (R470A). In some embodiments, the arginine residue at position 470 is replaced by an isoleucine residue (R470I). In some embodiments, the arginine residue at position 470 is replaced by an aspartic acid residue (R470D).

[0249] In some embodiments, the adenosine deaminase comprises a mutation at histidine471 of the hADAR2-D amino acid sequence, or a corresponding position in a homologous ADAR protein. In some embodiments, the histidine residue at position 471 is replaced by a lysine residue (H471K). In some embodiments, the histidine residue at position 471 is replaced by a threonine residue (H471T). In some embodiments, the histidine residue at position 471 is replaced by a valine residue (H471V).

[0250] In some embodiments, the adenosine deaminase comprises a mutation at proline472 of the hADAR2-D amino acid sequence, or a corresponding position in a homologous ADAR protein. In some embodiments, the proline residue at position 472 is replaced by a lysine residue (P472K). In some embodiments, the proline residue at position 472 is replaced by a threonine residue (P472T). In some embodiments, the proline residue at position 472 is replaced by an aspartic acid residue (P472D).

[0251] In some embodiments, the adenosine deaminase comprises a mutation at asparagine473 of the hADAR2-D amino acid sequence, or a corresponding position in a homologous ADAR protein. In some embodiments, the asparagine residue at position 473 is replaced by an arginine residue (N473R). In some embodiments, the asparagine residue at position 473 is replaced by a tryptophan residue (N473W). In some embodiments, the asparagine residue at position 473 is replaced by a proline residue (N473P). In some embodiments, the asparagine residue at position 473 is replaced by an aspartic acid residue (N473D).

[0252] In some embodiments, the adenosine deaminase comprises a mutation at arginine474 of the hADAR2-D amino acid sequence, or a corresponding position in a homologous ADAR protein. In some embodiments, the arginine residue at position 474 is replaced by a lysine residue (R474K). In some embodiments, the arginine residue at position 474 is replaced by a glycine residue (R474G). In some embodiments, the arginine residue at position 474 is replaced by an aspartic acid residue (R474D). In some embodiments, the arginine residue at position 474 is replaced by a glutamic acid residue (R474E).

[0253] In some embodiments, the adenosine deaminase comprises a mutation at lysine475 of the hADAR2-D amino acid sequence, or a corresponding position in a homologous ADAR protein. In some embodiments, the lysine residue at position 475 is replaced by a glutamine residue (K475Q). In some embodiments, the lysine residue at position 475 is replaced by an asparagine residue (K475N). In some embodiments, the lysine residue at position 475 is replaced by an aspartic acid residue (K475D).

[0254] In some embodiments, the adenosine deaminase comprises a mutation at alanine476 of the hADAR2-D amino acid sequence, or a corresponding position in a homologous ADAR protein. In some embodiments, the alanine residue at position 476 is replaced by a serine residue (A476S). In some embodiments, the alanine residue at position 476 is replaced by an arginine residue (A476R). In some embodiments, the alanine residue at position 476 is replaced by a glutamic acid residue (A476E).

[0255] In some embodiments, the adenosine deaminase comprises a mutation at arginine477 of the hADAR2-D amino acid sequence, or a corresponding position in a homologous ADAR protein. In some embodiments, the arginine residue at position 477 is replaced by a lysine residue (R477K). In some embodiments, the arginine residue at position 477 is replaced by a threonine residue (R477T). In some embodiments, the arginine residue at position 477 is replaced by a phenylalanine residue (R477F). In some embodiments, the arginine residue at position 474 is replaced by a glutamic acid residue (R477E).

[0256] In some embodiments, the adenosine deaminase comprises a mutation at glycine478 of the hADAR2-D amino acid sequence, or a corresponding position in a homologous ADAR protein. In some embodiments, the glycine residue at position 478 is replaced by an alanine residue (G478A). In some embodiments, the glycine residue at position 478 is replaced by an arginine residue (G478R). In some embodiments, the glycine residue at position 478 is replaced by a tyrosine residue (G478Y). In some embodiments, the adenosine deaminase comprises mutation G478I. In some embodiments, the adenosine deaminase comprises mutation G478L. In some embodiments, the adenosine deaminase comprises mutation G478V. In some embodiments, the adenosine deaminase comprises mutation G478F. In some embodiments, the adenosine deaminase comprises mutation G478M. In some embodiments, the adenosine deaminase comprises mutation G478C. In some embodiments, the adenosine deaminase comprises mutation G478P. In some embodiments, the adenosine deaminase comprises mutation G478T. In some embodiments, the adenosine deaminase comprises mutation G478S. In some embodiments, the adenosine deaminase comprises mutation G478W. In some embodiments, the adenosine deaminase comprises mutation G478Q. In some embodiments, the adenosine deaminase comprises mutation G478N. In some embodiments, the adenosine deaminase comprises mutation G478H. In some embodiments, the adenosine deaminase comprises mutation G478E. In some embodiments, the adenosine deaminase comprises mutation G478D. In some embodiments, the adenosine deaminase comprises mutation G478K. In some embodiments, the mutations at G478 described above are further made in combination with a E488Q mutation.

[0257] In some embodiments, the adenosine deaminase comprises a mutation at glutamine479 of the hADAR2-D amino acid sequence, or a corresponding position in a homologous ADAR protein. In some embodiments, the glutamine residue at position 479 is replaced by an asparagine residue (Q479N). In some embodiments, the glutamine residue at position 479 is replaced by a serine residue (Q479S). In some embodiments, the glutamine residue at position 479 is replaced by a proline residue (Q479P).

[0258] In some embodiments, the adenosine deaminase comprises a mutation at arginine348 of the hADAR2-D amino acid sequence, or a corresponding position in a homologous ADAR protein. In some embodiments, the arginine residue at position 348 is replaced by an alanine residue (R348A). In some embodiments, the arginine residue at position 348 is replaced by a glutamic acid residue (R348E).

[0259] In some embodiments, the adenosine deaminase comprises a mutation at valine351 of the hADAR2-D amino acid sequence, or a corresponding position in a homologous ADAR protein. In some embodiments, the valine residue at position 351 is replaced by a leucine residue (V351L). In some embodiments, the adenosine deaminase comprises mutation V351Y. In some embodiments, the adenosine deaminase comprises mutation V351M. In some embodiments, the adenosine deaminase comprises mutation V351T. In some embodiments, the adenosine deaminase comprises mutation V351G. In some embodiments, the adenosine deaminase comprises mutation V351A. In some embodiments, the adenosine deaminase comprises mutation V351F. In some embodiments, the adenosine deaminase comprises mutation V351E. In some embodiments, the adenosine deaminase comprises mutation V351I. In some embodiments, the adenosine deaminase comprises mutation V351C. In some embodiments, the adenosine deaminase comprises mutation V351H. In some embodiments, the adenosine deaminase comprises mutation V351P. In some embodiments, the adenosine deaminase comprises mutation V351S. In some embodiments, the adenosine deaminase comprises mutation V351K. In some embodiments, the adenosine deaminase comprises mutation V351N. In some embodiments, the adenosine deaminase comprises mutation V351W. In some embodiments, the adenosine deaminase comprises mutation V351Q. In some embodiments, the adenosine deaminase comprises mutation V351D. In some embodiments, the adenosine deaminase comprises mutation V351R. In some embodiments, the mutations at V351 described above are further made in combination with a E488Q mutation.

[0260] In some embodiments, the adenosine deaminase comprises a mutation at threonine375 of the hADAR2-D amino acid sequence, or a corresponding position in a homologous ADAR protein. In some embodiments, the threonine residue at position 375 is replaced by a glycine residue (T375G). In some embodiments, the threonine residue at position 375 is replaced by a serine residue (T375S). In some embodiments, the adenosine deaminase comprises mutation T375H. In some embodiments, the adenosine deaminase comprises mutation T375Q. In some embodiments, the adenosine deaminase comprises mutation T375C. In some embodiments, the adenosine deaminase comprises mutation T375N. In some embodiments, the adenosine deaminase comprises mutation T375M. In some embodiments, the adenosine deaminase comprises mutation T375A. In some embodiments, the adenosine deaminase comprises mutation T375W. In some embodiments, the adenosine deaminase comprises mutation T375V. In some embodiments, the adenosine deaminase comprises mutation T375R. In some embodiments, the adenosine deaminase comprises mutation T375E. In some embodiments, the adenosine deaminase comprises mutation T375K. In some embodiments, the adenosine deaminase comprises mutation T375F. In some embodiments, the adenosine deaminase comprises mutation T375I. In some embodiments, the adenosine deaminase comprises mutation T375D. In some embodiments, the adenosine deaminase comprises mutation T375P. In some embodiments, the adenosine deaminase comprises mutation T375L. In some embodiments, the adenosine deaminase comprises mutation T375Y. In some embodiments, the mutations at T375Y described above are further made in combination with an E488Q mutation.

[0261] In some embodiments, the adenosine deaminase comprises a mutation at arginine481 of the hADAR2-D amino acid sequence, or a corresponding position in a homologous ADAR protein. In some embodiments, the arginine residue at position 481 is replaced by a glutamic acid residue (R481E).

[0262] In some embodiments, the adenosine deaminase comprises a mutation at serine486 of the hADAR2-D amino acid sequence, or a corresponding position in a homologous ADAR protein. In some embodiments, the serine residue at position 486 is replaced by a threonine residue (S486T).

[0263] In some embodiments, the adenosine deaminase comprises a mutation at threonine490 of the hADAR2-D amino acid sequence, or a corresponding position in a homologous ADAR protein. In some embodiments, the threonine residue at position 490 is replaced by an alanine residue (T490A). In some embodiments, the threonine residue at position 490 is replaced by a serine residue (T490S).

[0264] In some embodiments, the adenosine deaminase comprises a mutation at serine495 of the hADAR2-D amino acid sequence, or a corresponding position in a homologous ADAR protein. In some embodiments, the serine residue at position 495 is replaced by a threonine residue (S495T).

[0265] In some embodiments, the adenosine deaminase comprises a mutation at arginine510 of the hADAR2-D amino acid sequence, or a corresponding position in a homologous ADAR protein. In some embodiments, the arginine residue at position 510 is replaced by a glutamine residue (R510Q). In some embodiments, the arginine residue at position 510 is replaced by an alanine residue (R510A). In some embodiments, the arginine residue at position 510 is replaced by a glutamic acid residue (R510E).

[0266] In some embodiments, the adenosine deaminase comprises a mutation at glycine593 of the hADAR2-D amino acid sequence, or a corresponding position in a homologous ADAR protein. In some embodiments, the glycine residue at position 593 is replaced by an alanine residue (G593A). In some embodiments, the glycine residue at position 593 is replaced by a glutamic acid residue (G593E).

[0267] In some embodiments, the adenosine deaminase comprises a mutation at lysine594 of the hADAR2-D amino acid sequence, or a corresponding position in a homologous ADAR protein. In some embodiments, the lysine residue at position 594 is replaced by an alanine residue (K594A).

[0268] In some embodiments, the adenosine deaminase comprises a mutation at any one or more of positions A454, R455, 1456, F457, S458, P459, H460, P462, D469, R470, H471, P472, N473, R474, K475, A476, R477, G478, Q479, R348, R510, G593, K594 of the hADAR2-D amino acid sequence, or a corresponding position in a homologous ADAR protein.

[0269] In some embodiments, the adenosine deaminase comprises any one or more of mutations A454S, A454C, A454D, R455A, R455V, R455H, I456V, I456L, I456D, F457Y, F457R, F457E, S458V, S458F, S458P, P459C, P459H, P459W, H460R, H460I, H460P, P462S, P462W, P462E, D469Q, D469S, D469Y, R470A, R470I, R470D, H471K, H471T, H471V, P472K, P472T, P472D, N473R, N473W, N473P, R474K, R474G, R474D, K475Q, K475N, K475D, A476S, A476R, A476E, R477K, R477T, R477F, G478A, G478R, G478Y, Q479N, Q479S, Q479P, R348A, R510Q, R510A, G593A, G593E, K594A of the hADAR2-D amino acid sequence, or a corresponding position in a homologous ADAR protein.

[0270] In some embodiments, the adenosine deaminase comprises a mutation at any one or more of positions T375, V351, G478, S458, H460 of the hADAR2-D amino acid sequence, or a corresponding position in a homologous ADAR protein, optionally in combination a mutation at E488. In some embodiments, the adenosine deaminase comprises one or more of mutations selected from T375G, T375C, T375H, T375Q, V351M, V351T, V351Y, G478R, S458F, H460I, optionally in combination with E488Q.

[0271] In some embodiments, the adenosine deaminase comprises one or more of mutations selected from T375H, T375Q, V351M, V351Y, H460P, optionally in combination with E488Q.

[0272] In some embodiments, the adenosine deaminase comprises mutations T375S and S458F, optionally in combination with E488Q.

[0273] In some embodiments, the adenosine deaminase comprises a mutation at two or more of positions T375, N473, R474, G478, S458, P459, V351, R455, R455, T490, R348, Q479 of the hADAR2-D amino acid sequence, or a corresponding position in a homologous ADAR protein, optionally in combination a mutation at E488. In some embodiments, the adenosine deaminase comprises two or more of mutations selected from T375G, T375S, N473D, R474E, G478R, S458F, P459W, V351L, R455G, R455S, T490A, R348E, Q479P, optionally in combination with E488Q.

[0274] In some embodiments, the adenosine deaminase comprises mutations T375G and V351L. In some embodiments, the adenosine deaminase comprises mutations T375G and R455G. In some embodiments, the adenosine deaminase comprises mutations T375G and R455S. In some embodiments, the adenosine deaminase comprises mutations T375G and T490A. In some embodiments, the adenosine deaminase comprises mutations T375G and R348E. In some embodiments, the adenosine deaminase comprises mutations T375S and V351L. In some embodiments, the adenosine deaminase comprises mutations T375S and R455G. In some embodiments, the adenosine deaminase comprises mutations T375S and R455S. In some embodiments, the adenosine deaminase comprises mutations T375S and T490A. In some embodiments, the adenosine deaminase comprises mutations T375S and R348E. In some embodiments, the adenosine deaminase comprises mutations N473D and V351L. In some embodiments, the adenosine deaminase comprises mutations N473D and R455G. In some embodiments, the adenosine deaminase comprises mutations N473D and R455S. In some embodiments, the adenosine deaminase comprises mutations N473D and T490A. In some embodiments, the adenosine deaminase comprises mutations N473D and R348E. In some embodiments, the adenosine deaminase comprises mutations R474E and V351L. In some embodiments, the adenosine deaminase comprises mutations R474E and R455G. In some embodiments, the adenosine deaminase comprises mutations R474E and R455S. In some embodiments, the adenosine deaminase comprises mutations R474E and T490A. In some embodiments, the adenosine deaminase comprises mutations R474E and R348E. In some embodiments, the adenosine deaminase comprises mutations S458F and T375G. In some embodiments, the adenosine deaminase comprises mutations S458F and T375S. In some embodiments, the adenosine deaminase comprises mutations S458F and N473D. In some embodiments, the adenosine deaminase comprises mutations S458F and R474E. In some embodiments, the adenosine deaminase comprises mutations S458F and G478R. In some embodiments, the adenosine deaminase comprises mutations G478R and T375G. In some embodiments, the adenosine deaminase comprises mutations G478R and T375S. In some embodiments, the adenosine deaminase comprises mutations G478R and N473D. In some embodiments, the adenosine deaminase comprises mutations G478R and R474E. In some embodiments, the adenosine deaminase comprises mutations P459W and T375G. In some embodiments, the adenosine deaminase comprises mutations P459W and T375S. In some embodiments, the adenosine deaminase comprises mutations P459W and N473D. In some embodiments, the adenosine deaminase comprises mutations P459W and R474E. In some embodiments, the adenosine deaminase comprises mutations P459W and G478R. In some embodiments, the adenosine deaminase comprises mutations P459W and S458F. In some embodiments, the adenosine deaminase comprises mutations Q479P and T375G. In some embodiments, the adenosine deaminase comprises mutations Q479P and T375S. In some embodiments, the adenosine deaminase comprises mutations Q479P and N473D. In some embodiments, the adenosine deaminase comprises mutations Q479P and R474E. In some embodiments, the adenosine deaminase comprises mutations Q479P and G478R. In some embodiments, the adenosine deaminase comprises mutations Q479P and S458F. In some embodiments, the adenosine deaminase comprises mutations Q479P and P459W. All mutations described in this paragraph may also further be made in combination with a E488Q mutations.

[0275] In some embodiments, the adenosine deaminase comprises a mutation at any one or more of positions K475, Q479, P459, G478, S458 of the hADAR2-D amino acid sequence, or a corresponding position in a homologous ADAR protein, optionally in combination a mutation at E488. In some embodiments, the adenosine deaminase comprises one or more of mutations selected from K475N, Q479N, P459W, G478R, S458P, S458F, optionally in combination with E488Q.

[0276] In some embodiments, the adenosine deaminase comprises a mutation at any one or more of positions T375, V351, R455, H460, A476 of the hADAR2-D amino acid sequence, or a corresponding position in a homologous ADAR protein, optionally in combination a mutation at E488. In some embodiments, the adenosine deaminase comprises one or more of mutations selected from T375G, T375C, T375H, T375Q, V351M, V351T, V351Y, R455H, H460P, H460I, A476E, optionally in combination with E488Q.

[0277] In certain embodiments, improvement of editing and reduction of off-target modification is achieved by chemical modification of gRNAs. gRNAs which are chemically modified as exemplified in Vogel et al. (2014), Angew Chem Int Ed, 53:6267-6271, doi:10.1002/anie.201402634 (incorporated herein by reference in its entirety) reduce off-target activity and improve on-target efficiency. 2′-O-methyl and phosphothioate modified guide RNAs in general improve editing efficiency in cells.

[0278] ADAR has been known to demonstrate a preference for neighboring nucleotides on either side of the edited A (www.nature.com/nsmb/journal/v23/n5/full/nsmb.3203.html, Matthews et al. (2017), Nature Structural Mol Biol, 23(5): 426-433, incorporated herein by reference in its entirety). Accordingly, in certain embodiments, the gRNA, target, and/or ADAR is selected optimized for motif preference.

[0279] Intentional mismatches have been demonstrated in vitro to allow for editing of non-preferred motifs (https:/academic.oup.com/nar/article-lookup/doi/10.1093/nar/gku272; Schneider et al (2014), Nucleic Acid Res, 42(10):e87); Fukuda et al. (2017), Scienticic Reports, 7, doi:10.1038/srep41478, incorporated herein by reference in its entirety). Accordingly, in certain embodiments, to enhance RNA editing efficiency on non-preferred 5′ or 3′ neighboring bases, intentional mismatches in neighboring bases are introduced.

[0280] Results suggest that A's opposite C's in the targeting window of the ADAR deaminase domain are preferentially edited over other bases. Additionally, A's base-paired with U's within a few bases of the targeted base show low levels of editing by Cas13b-ADAR fusions, suggesting that there is flexibility for the enzyme to edit multiple A's. See e.g. FIG. 18. These two observations suggest that multiple A's in the activity window of Cas13b-ADAR fusions could be specified for editing by mismatching all A's to be edited with C's. Accordingly, in certain embodiments, multiple A:C mismatches in the activity window are designed to create multiple A:I edits. In certain embodiments, to suppress potential off-target editing in the activity window, non-target A's are paired with A's or G's.

[0281] The terms “editing specificity” and “editing preference” are used interchangeably herein to refer to the extent of A-to-I editing at a particular adenosine site in a double-stranded substrate. In some embodiment, the substrate editing preference is determined by the 5′ nearest neighbor and/or the 3′ nearest neighbor of the target adenosine residue. In some embodiments, the adenosine deaminase has preference for the 5′ nearest neighbor of the substrate ranked as U>A>C>G (“>” indicates greater preference). In some embodiments, the adenosine deaminase has preference for the 3′ nearest neighbor of the substrate ranked as G>C-A>U (“>” indicates greater preference; “˜” indicates similar preference). In some embodiments, the adenosine deaminase has preference for the 3′ nearest neighbor of the substrate ranked as G>C>U˜A (“>” indicates greater preference; “˜” indicates similar preference). In some embodiments, the adenosine deaminase has preference for the 3′ nearest neighbor of the substrate ranked as G>C>A>U (“>” indicates greater preference). In some embodiments, the adenosine deaminase has preference for the 3′ nearest neighbor of the substrate ranked as C˜G˜A>U (“>” indicates greater preference; “˜” indicates similar preference). In some embodiments, the adenosine deaminase has preference for a triplet sequence containing the target adenosine residue ranked as TAG>AAG>CAC>AAT>GAA>GAC (“>” indicates greater preference), the center A being the target adenosine residue.

[0282] In some embodiments, the substrate editing preference of an adenosine deaminase is affected by the presence or absence of a nucleic acid binding domain in the adenosine deaminase protein. In some embodiments, to modify substrate editing preference, the deaminase domain is connected with a double-strand RNA binding domain (dsRBD) or a double-strand RNA binding motif (dsRBM). In some embodiments, the dsRBD or dsRBM may be derived from an ADAR protein, such as hADAR1 or hADAR2. In some embodiments, a full length ADAR protein that comprises at least one dsRBD and a deaminase domain is used. In some embodiments, the one or more dsRBM or dsRBD is at the N-terminus of the deaminase domain. In other embodiments, the one or more dsRBM or dsRBD is at the C-terminus of the deaminase domain.

[0283] In some embodiments, the substrate editing preference of an adenosine deaminase is affected by amino acid residues near or in the active center of the enzyme. In some embodiments, to modify substrate editing preference, the adenosine deaminase may comprise one or more of the mutations: G336D, G487R, G487K, G487W, G487Y, E488Q, E488N, T490A, V493A, V493T, V493S, N597K, N597R, A589V, S599T, N613K, N613R, based on amino acid sequence positions of hADAR2-D, and mutations in a homologous ADAR protein corresponding to the above.

[0284] Particularly, in some embodiments, to reduce editing specificity, the adenosine deaminase can comprise one or more of mutations E488Q, V493A, N597K, N613K, based on amino acid sequence positions of hADAR2-D, and mutations in a homologous ADAR protein corresponding to the above. In some embodiments, to increase editing specificity, the adenosine deaminase can comprise mutation T490A.

[0285] In some embodiments, to increase editing preference for target adenosine (A) with an immediate 5′ G, such as substrates comprising the triplet sequence GAC, the center A being the target adenosine residue, the adenosine deaminase can comprise one or more of mutations G336D, E488Q, E488N, V493T, V493S, V493A, A589V, N597K, N597R, S599T, N613K, N613R, based on amino acid sequence positions of hADAR2-D, and mutations in a homologous ADAR protein corresponding to the above.

[0286] Particularly, in some embodiments, the adenosine deaminase comprises mutation E488Q or a corresponding mutation in a homologous ADAR protein for editing substrates comprising the following triplet sequences: GAC, GAA, GAU, GAG, CAU, AAU, UAC, the center A being the target adenosine residue.

[0287] In some embodiments, the adenosine deaminase comprises the wild-type amino acid sequence of hADAR1-D as defined in SEQ ID No. 761. In some embodiments, the adenosine deaminase comprises one or more mutations in the hADAR1-D sequence, such that the editing efficiency, and/or substrate editing preference of hADAR1-D is changed according to specific needs.

[0288] In some embodiments, the adenosine deaminase comprises a mutation at Glycine1007 of the hADAR1-D amino acid sequence, or a corresponding position in a homologous ADAR protein. In some embodiments, the glycine residue at position 1007 is replaced by a non-polar amino acid residue with relatively small side chains. For example, in some embodiments, the glycine residue at position 1007 is replaced by an alanine residue (G1007A). In some embodiments, the glycine residue at position 1007 is replaced by a valine residue (G1007V). In some embodiments, the glycine residue at position 1007 is replaced by an amino acid residue with relatively large side chains. In some embodiments, the glycine residue at position 1007 is replaced by an arginine residue (G1007R). In some embodiments, the glycine residue at position 1007 is replaced by a lysine residue (G1007K). In some embodiments, the glycine residue at position 1007 is replaced by a tryptophan residue (G1007W). In some embodiments, the glycine residue at position 1007 is replaced by a tyrosine residue (G1007Y). Additionally, in other embodiments, the glycine residue at position 1007 is replaced by a leucine residue (G1007L). In other embodiments, the glycine residue at position 1007 is replaced by a threonine residue (G1007T). In other embodiments, the glycine residue at position 1007 is replaced by a serine residue (G1007S).

[0289] In some embodiments, the adenosine deaminase comprises a mutation at glutamic acid1008 of the hADAR1-D amino acid sequence, or a corresponding position in a homologous ADAR protein. In some embodiments, the glutamic acid residue at position 1008 is replaced by a polar amino acid residue having a relatively large side chain. In some embodiments, the glutamic acid residue at position 1008 is replaced by a glutamine residue (E1008Q). In some embodiments, the glutamic acid residue at position 1008 is replaced by a histidine residue (E1008H). In some embodiments, the glutamic acid residue at position 1008 is replaced by an arginine residue (E1008R). In some embodiments, the glutamic acid residue at position 1008 is replaced by a lysine residue (E1008K). In some embodiments, the glutamic acid residue at position 1008 is replaced by a nonpolar or small polar amino acid residue. In some embodiments, the glutamic acid residue at position 1008 is replaced by a phenylalanine residue (E1008F). In some embodiments, the glutamic acid residue at position 1008 is replaced by a tryptophan residue (E1008W). In some embodiments, the glutamic acid residue at position 1008 is replaced by a glycine residue (E1008G). In some embodiments, the glutamic acid residue at position 1008 is replaced by an isoleucine residue (E1008I). In some embodiments, the glutamic acid residue at position 1008 is replaced by a valine residue (E1008V). In some embodiments, the glutamic acid residue at position 1008 is replaced by a proline residue (E1008P). In some embodiments, the glutamic acid residue at position 1008 is replaced by a serine residue (E1008S). In other embodiments, the glutamic acid residue at position 1008 is replaced by an asparagine residue (E1008N). In other embodiments, the glutamic acid residue at position 1008 is replaced by an alanine residue (E1008A). In other embodiments, the glutamic acid residue at position 1008 is replaced by a Methionine residue (E1008M). In some embodiments, the glutamic acid residue at position 1008 is replaced by a leucine residue (E1008L).

[0290] In some embodiments, to improve editing efficiency, the adenosine deaminase may comprise one or more of the mutations: E1007S, E1007A, E1007V, E1008Q, E1008R, E1008H, E1008M, E1008N, E1008K, based on amino acid sequence positions of hADAR1-D, and mutations in a homologous ADAR protein corresponding to the above.

[0291] In some embodiments, to reduce editing efficiency, the adenosine deaminase may comprise one or more of the mutations: E1007R, E1007K, E1007Y, E1007L, E1007T, E1008G, E1008, E1008P, E1008V, E1008F, E1008W, E1008S, E1008N, E1008K, based on amino acid sequence positions of hADAR1-D, and mutations in a homologous ADAR protein corresponding to the above.

[0292] In some embodiments, the substrate editing preference, efficiency and/or selectivity of an adenosine deaminase is affected by amino acid residues near or in the active center of the enzyme. In some embodiments, the adenosine deaminase comprises a mutation at the glutamic acid 1008 position in hADAR1-D sequence, or a corresponding position in a homologous ADAR protein. In some embodiments, the mutation is E1008R, or a corresponding mutation in a homologous ADAR protein. In some embodiments, the E1008R mutant has an increased editing efficiency for target adenosine residue that has a mismatched G residue on the opposite strand.

[0293] In some embodiments, the adenosine deaminase protein further comprises or is connected to one or more double-stranded RNA (dsRNA) binding motifs (dsRBMs) or domains (dsRBDs) for recognizing and binding to double-stranded nucleic acid substrates. In some embodiments, the interaction between the adenosine deaminase and the double-stranded substrate is mediated by one or more additional protein factor(s), including a CRISPR/CAS protein factor. In some embodiments, the interaction between the adenosine deaminase and the double-stranded substrate is further mediated by one or more nucleic acid component(s), including a guide RNA.

### Modified Adenosine Deaminase Having C-to U Deamination Activity

[0294] In certain example embodiments, directed evolution may be used to design modified ADAR proteins capable of catalyzing additional reactions besides deamination of an adenine to a hypoxanthine. For example, the modified ADAR protein may be capable of catalyzing deamination of a cytidine to a uracil. While not bound by a particular theory, mutations that improve C to U activity may alter the shape of the binding pocket to be more amenable to the smaller cytidine base.

[0295] In some embodiments, the modified adenosine deaminase having C-to-U deamination activity comprises a mutation at any one or more of positions V351, T375, R455, and E488 of the hADAR2-D amino acid sequence, or a corresponding position in a homologous ADAR protein. In some embodiments, the adenosine deaminase comprises mutation E488Q. In some embodiments, the adenosine deaminase comprises one or more of mutations selected from V351I, V351L, V351F, V351M, V351C, V351A, V351G, V351P, V351T, V351S, V351Y, V351W, V351Q, V351N, V351H, V351E, V351D, V351K, V351R, T375I, T375L, T375V, T375F, T375M, T375C, T375A, T375G, T375P, T375S, T375Y, T375W, T375Q, T375N, T375H, T375E, T375D, T375K, T375R, R455I, R455L, R455V, R455F, R455M, R455C, R455A, R455G, R455P, R455T, R455S, R455Y, R455W, R455Q, R455N, R455H, R455E, R455D, R455K. In some embodiments, the adenosine deaminase comprises mutation E488Q, and further comprises one or more of mutations selected from V351I, V351L, V351F, V351M, V351C, V351A, V351G, V351P, V351T, V351S, V351Y, V351W, V351Q, V351N, V351H, V351E, V351D, V351K, V351R, T375I, T375L, T375V, T375F, T375M, T375C, T375A, T375G, T375P, T375S, T375Y, T375W, T375Q, T375N, T375H, T375E, T375D, T375K, T375R, R455I, R455L, R455V, R455F, R455M, R455C, R455A, R455G, R455P, R455T, R455S, R455Y, R455W, R455Q, R455N, R455H, R455E, R455D, R455K.

[0296] In connection with the aforementioned modified ADAR protein having C-to-U deamination activity, the invention described herein also relates to a method for deaminating a C in a target RNA sequence of interest, comprising delivering to a target RNA or DNA an AD-functoinalized composition disclosed herein.

[0297] In certain example embodiments, the method for deaminating a C in a target RNA sequence comprising delivering to said target RNA: (a) a catalytically inactive (dead) Cas; (b) a guide molecule which comprises a guide sequence linked to a direct repeat sequence; and (c) a modified ADAR protein having C-to-U deamination activity or catalytic domain thereof, wherein said modified ADAR protein or catalytic domain thereof is covalently or non-covalently linked to said dead Cas protein or said guide molecule or is adapted to link thereto after delivery; wherein guide molecule forms a complex with said dead Cas protein and directs said complex to bind said target RNA sequence of interest; wherein said guide sequence is capable of hybridizing with a target sequence comprising said C to form an RNA duplex; wherein, optionally, said guide sequence comprises a non-pairing A or U at a position corresponding to said C resulting in a mismatch in the RNA duplex formed; and wherein said modified ADAR protein or catalytic domain thereof deaminates said C in said RNA duplex.

[0298] In connection with the aforementioned modified ADAR protein having C-to-U deamination activity, the invention described herein further relates to an engineered, non-naturally occurring system suitable for deaminating a C in a target locus of interest, comprising: (a) a guide molecule which comprises a guide sequence linked to a direct repeat sequence, or a nucleotide sequence encoding said guide molecule; (b) a catalytically inactive Cas13 protein, or a nucleotide sequence encoding said catalytically inactive Cas13 protein; (c) a modified ADAR protein having C-to-U deamination activity or catalytic domain thereof, or a nucleotide sequence encoding said modified ADAR protein or catalytic domain thereof, wherein said modified ADAR protein or catalytic domain thereof is covalently or non-covalently linked to said Cas13 protein or said guide molecule or is adapted to link thereto after delivery; wherein said guide sequence is capable of hybridizing with a target RNA sequence comprising a C to form an RNA duplex; wherein, optionally, said guide sequence comprises a non-pairing A or U at a position corresponding to said C resulting in a mismatch in the RNA duplex formed; wherein, optionally, the system is a vector system comprising one or more vectors comprising: (a) a first regulatory element operably linked to a nucleotide sequence encoding said guide molecule which comprises said guide sequence, (b) a second regulatory element operably linked to a nucleotide sequence encoding said catalytically inactive Cas13 protein; and (c) a nucleotide sequence encoding a modified ADAR protein having C-to-U deamination activity or catalytic domain thereof which is under control of said first or second regulatory element or operably linked to a third regulatory element; wherein, if said nucleotide sequence encoding a modified ADAR protein or catalytic domain thereof is operably linked to a third regulatory element, said modified ADAR protein or catalytic domain thereof is adapted to link to said guide molecule or said Cas13 protein after expression; wherein components (a), (b) and (c) are located on the same or different vectors of the system, optionally wherein said first, second, and/or third regulatory element is an inducible promoter.

[0299] According to the present invention, the substrate of the adenosine deaminase is an RNA/DNAn RNA duplex formed upon binding of the guide molecule to its DNA target which then forms the CRISPR-Cas complex with the CRISPR-Cas enzyme. The substrate of the adenosine deaminase can also be an RNA/RNA duplex formed upon binding of the guide molecule to its RNA target which then forms the CRISPR-Cas complex with the CRISPR-Cas enzyme. The RNA/DNA or DNA/RNAn RNA duplex is also referred to herein as the “RNA/DNA hybrid”, “DNA/RNA hybrid” or “double-stranded substrate”. The particular features of the guide molecule and CRISPR-Cas enzyme are detailed below.

[0300] The term “editing selectivity” as used herein refers to the fraction of all sites on a double-stranded substrate that is edited by an adenosine deaminase. Without being bound by theory, it is contemplated that editing selectivity of an adenosine deaminase is affected by the double-stranded substrate's length and secondary structures, such as the presence of mismatched bases, bulges and/or internal loops.

[0301] In some embodiments, when the substrate is a perfectly base-paired duplex longer than 50 bp, the adenosine deaminase may be able to deaminate multiple adenosine residues within the duplex (e.g., 50% of all adenosine residues). In some embodiments, when the substrate is shorter than 50 bp, the editing selectivity of an adenosine deaminase is affected by the presence of a mismatch at the target adenosine site. Particularly, in some embodiments, adenosine (A) residue having a mismatched cytidine (C) residue on the opposite strand is deaminated with high efficiency. In some embodiments, adenosine (A) residue having a mismatched guanosine (G) residue on the opposite strand is skipped without editing.

### Targeting Domain

[0302] The Methods, Tools, and Compositions of the Invention Comprise or Make Use of a targeting component which can be referred to as a targeting domain. The targeting domain is preferably a DNA or RNA targeting domain, more particularly an oligonucleotide targeting domain, or a variant or fragment thereof which retains DNA and/or RNA binding activity. The oligonucleotide targeting domain may bind a sequence, motif, or structural feature of the RNA or DNA of interest at or adjacent to the target locus. A structural feature may include hairpins, tetraloops, or other secondary structural features of a nucleic acid. As used herein “adjacent” means within a distance and/or orientation of the target locus in which the adenosine deaminase can complete its base editing function. In certain example embodiments, the oligonucleotide binding protein may be a RNA-binding protein or functional domain thereof, or a DNA-binding protein or functional domain thereof.

[0303] In particular embodiments, the targeting domain further comprises a guide RNA (as will be detailed below). The nucleic acid binding protein can be an (endo)nuclease or any other (oligo)nucleotide binding protein. In particular embodiments, the nucleotide binding protein is modified to inactivate any other function not required for said DNA or RNA binding. In particular embodiments, where the nucleotide binding protein is an (endo)nuclease, preferably the (endo)nuclease has altered or modified activity (i.e. a modified nuclease, as described herein elsewhere) compared to the wildtype DNA or RNA binding protein. In certain embodiments, said nuclease is a targeted or site-specific or homing nuclease or a variant thereof having altered or modified activity. In certain embodiments, said (oligo)nucleotide binding protein is the (oligo)nucleotide binding domain of said (oligo)nucleotide binding protein and does not comprise one or more domains of said protein not required for DNA and/or RNA binding (more particular does not comprise one or more other functional domains).

### RNA-Binding Proteins

[0304] In certain example embodiments, the oligonucleotide binding domain may comprise or consist of a RNA-binding protein, or functional domain thereof, that comprises a RNA recognition motif. Example RNA-binding proteins comprising a RNA recognition motif include, but are not limited to, A2BP1; ACF; BOLL; BRUNOL4; BRUNOL5; BRUNOL6; CCBL2; CGI96; CIRBP; CNOT 4; CPEB2; CPEB3; CPEB4; CPSF7; CSTF2; CSTF2T; CUGBPl; CUGBP2; D10S102; DAZ 1; DAZ2; DAZ3; DAZ4; DAZAP1; DAZL; DNAJC17; DND1; EIF3S4; EIF3S9; EIF4B; El F4H; ELAVL1; ELAVL2; ELAVL3; ELAVL4; ENOX1; ENOX2; EWSR1; FUS; FUSIP1; G3BP; G3BP1; G3BP2; GRSF1; HNRNPL; HNRPA0; HNRPA1; HNRPA2B1; HNRPA3; H NRPAB; HNRPC; HNRPCL1; HNRPD; HNRPDL; HNRPF; HNRPH1; HNRPH2; HNRPH 3; HNRPL; HNRPLL; HNRPM; HNRPR; HRNBP1; HSU53209; HTATSF1; IGF2BP1; IGF 2BP2; IGF2BP3; LARP7; MKI67IP; MSI1; MSI2; MSSP2; MTHFSD; MYEF2; NCBP2; N CL; NOL8; NONO; P14; PABPCl; PABPC1L; PABPC3; PABPC4; PABPC5; PABPN1; PO LDIP3; PPARGC1; PPARGC1A; PPARGC1B; PPIE; PPIL4; PPRC1; PSPC1; PTBP1; PTB P2; PUF60; RALY; RALYL; RAVERI; RAVER2; RBM10; RBM11; RBM12; RBM12B; R BM14; RBM15; RBM15B; RBM16; RBM17; RBM18; RBM19; RBM22; RBM23; RBM24; RBM25; RBM26; RBM27; RBM28; RBM3; RBM32B; RBM33; RBM34; RBM35A; RBM3 5B; RBM38; RBM39; RBM4; RBM41; RBM42; RBM44; RBM45; RBM46; RBM47; RBM 4B; RBM5; RBM7; RBM8A; RBM9; RBMS1; RBMS2; RBMS3; RBMX; RBMX2; RBMX L2; RBMY1A1; RBMY1B; RBMY1E; RBMY1F; RBMY2FP; RBPMS; RBPMS2; RDBP; RNPC3; RNPC4; RNPS1; ROD1; SAFB; SAFB2; SART3; SETD1A; SF3B14; SF3B4; SFP Q; SFRS1; SFRS10; SFRS11; SFRS12; SFRS15; SFRS2; SFRS2B; SFRS3; SFRS4; SFRS5; SFRS6; SFRS7; SFRS9; SLIRP; SLTM; SNRP70; SNRPA; SNRPB2; SPEN; SR140; SRRP 35; SSB; SYNCRIP; TAF15; TARDBP; THOC4; TIA1; TIAL1; TNRC4; TNRC6C; TRA2A; TRSPAP1; TUT1; U1 SNRNPBP; U2AF1; U2AF2; UHMK1; ZCRB1; ZNF638; ZRSR1; an d ZRSR2.

[0305] In certain example embodiments, the RNA-binding protein or function domain thereof may comprise a K homology domain. Example RNA-binding proteins comprising a K homology domain include, but are not limited to, AKAP1; ANKHD1; ANKRD17; ASCC1; BICC1; DDX43; DDX53; DPPA5; FMR1; FUBP1; FUBP3; FXR1; FXR2; GLD1; HDLBP; HNRPK; IGF2BP1; IGF2BP2; IGF2BP3; KHDRB Si; KHDRBS2; KHDRBS3; KHSRP; KRR1; MEX3A; MEX3B; MEX3C; MEX3D; NOVA 1; NOVA2; PCBP1; PCBP2; PCBP3; PCBP4; PNO1; PNPT1; QKI; SF 1; and TDRKH

[0306] In certain example embodiments, the RNA-binding protein comprises a zinc finger motif RNA-binding proteins or functional domains thereof may comprise a Cys2-His2, Gag-knuckle, Treble-clet, Zinc ribbon, Zn2/Cys6 class motif.

[0307] In certain example embodiments, the RNA-binding protein may comprise a Pumilio homology domain.

### Talens

[0308] In certain embodiments, the nucleic acid binding protein is a (modified) transcription activator-like effector nuclease (TALEN) system. Transcription activator-like effectors (TALEs) can be engineered to bind practically any desired DNA sequence. Exemplary methods of genome editing using the TALEN system can be found for example in Cermak T. Doyle E L. Christian M. Wang L. Zhang Y. Schmidt C, et al. Efficient design and assembly of custom TALEN and other TAL effector-based constructs for DNA targeting. Nucleic Acids Res. 2011; 39:e82; Zhang F. Cong L. Lodato S. Kosuri S. Church G M. Arlotta P Efficient construction of sequence-specific TAL effectors for modulating mammalian transcription. Nat Biotechnol. 2011; 29:149-153 and U.S. Pat. Nos. 8,450,471, 8,440,431 and 8,440,432, all of which are specifically incorporated by reference. By means of further guidance, and without limitation, naturally occurring TALEs or “wild type TALEs” are nucleic acid binding proteins secreted by numerous species of proteobacteria. TALE polypeptides contain a nucleic acid binding domain composed of tandem repeats of highly conserved monomer polypeptides that are predominantly 33, 34 or 35 amino acids in length and that differ from each other mainly in amino acid positions 12 and 13. In advantageous embodiments the nucleic acid is DNA. As used herein, the term “polypeptide monomers”, or “TALE monomers” will be used to refer to the highly conserved repetitive polypeptide sequences within the TALE nucleic acid binding domain and the term “repeat variable di-residues” or “RVD” will be used to refer to the highly variable amino acids at positions 12 and 13 of the polypeptide monomers. As provided throughout the disclosure, the amino acid residues of the RVD are depicted using the IUPAC single letter code for amino acids. A general representation of a TALE monomer which is comprised within the DNA binding domain is X1-11-(X12X13)-X14-33 or 34 or 35, where the subscript indicates the amino acid position and X represents any amino acid. X12X13 indicate the RVDs. In some polypeptide monomers, the variable amino acid at position 13 is missing or absent and in such polypeptide monomers, the RVD consists of a single amino acid. In such cases the RVD may be alternatively represented as X*, where X represents X12 and (*) indicates that X13 is absent. The DNA binding domain comprises several repeats of TALE monomers and this may be represented as (X1-11-(X12X13)-X14-33 or 34 or 35)z, where in an advantageous embodiment, z is at least 5 to 40. In a further advantageous embodiment, z is at least 10 to 26. The TALE monomers have a nucleotide binding affinity that is determined by the identity of the amino acids in its RVD. For example, polypeptide monomers with an RVD of NI preferentially bind to adenine (A), polypeptide monomers with an RVD of NG preferentially bind to thymine (T), polypeptide monomers with an RVD of HD preferentially bind to cytosine (C) and polypeptide monomers with an RVD of NN preferentially bind to both adenine (A) and guanine (G). In yet another embodiment of the invention, polypeptide monomers with an RVD of IG preferentially bind to T. Thus, the number and order of the polypeptide monomer repeats in the nucleic acid binding domain of a TALE determines its nucleic acid target specificity. In still further embodiments of the invention, polypeptide monomers with an RVD of NS recognize all four base pairs and may bind to A, T, G or C. The structure and function of TALEs is further described in, for example, Moscou et al., Science 326:1501 (2009); Boch et al., Science 326:1509-1512 (2009); and Zhang et al., Nature Biotechnology 29:149-153 (2011), each of which is incorporated by reference in its entirety. In certain embodiments, targeting is effected by a polynucleic acid binding TALEN fragment. In certain embodiments, the targeting domain comprises or consists of a catalytically inactive TALEN or nucleic acid binding fragment thereof.

### Zn-Finger Nucleases

[0309] In certain embodiments, the targeting domain comprises or consists of a (modified) zinc-finger nuclease (ZFN) system. The ZFN system uses artificial restriction enzymes generated by fusing a zinc finger DNA-binding domain to a DNA-cleavage domain that can be engineered to target desired DNA sequences. Exemplary methods of genome editing using ZFNs can be found for example in U.S. Pat. Nos. 6,534,261, 6,607,882, 6,746,838, 6,794,136, 6,824,978, 6,866,997, 6,933,113, 6,979,539, 7,013,219, 7,030,215, 7,220,719, 7,241,573, 7,241,574, 7,585,849, 7,595,376, 6,903,185, and 6,479,626, all of which are specifically incorporated by reference. By means of further guidance, and without limitation, artificial zinc-finger (ZF) technology involves arrays of ZF modules to target new DNA-binding sites in the genome. Each finger module in a ZF array targets three DNA bases. A customized array of individual zinc finger domains is assembled into a ZF protein (ZFP). ZFPs can comprise a functional domain. The first synthetic zinc finger nucleases (ZFNs) were developed by fusing a ZF protein to the catalytic domain of the Type IIS restriction enzyme FokI. (Kim, Y. G. et al., 1994, Chimeric restriction endonuclease, Proc. Natl. Acad. Sci. U.S.A. 91, 883-887; Kim, Y. G. et al., 1996, Hybrid restriction enzymes: zinc finger fusions to Fok I cleavage domain. Proc. Natl. Acad. Sci. U.S.A. 93, 1156-1160). Increased cleavage specificity can be attained with decreased off target activity by use of paired ZFN heterodimers, each targeting different nucleotide sequences separated by a short spacer. (Doyon, Y. et al., 2011, Enhancing zinc-finger-nuclease activity with improved obligate heterodimeric architectures. Nat. Methods 8, 74-79). ZFPs can also be designed as transcription activators and repressors and have been used to target many genes in a wide variety of organisms. In certain embodiments, the targeting domain comprises or consists of a nucleic acid binding zinc finger nuclease or a nucleic acid binding fragment thereof. In certain embodiments, the nucleic acid binding (fragment of) a zinc finger nuclease is catalytically inactive.

### Meganuclease

[0310] In certain embodiments, the targeting domain comprises a (modified) meganuclease, which are endodeoxyribonucleases characterized by a large recognition site (double-stranded DNA sequences of 12 to 40 base pairs). Exemplary method for using meganucleases can be found in U.S. Pat. Nos. 8,163,514; 8,133,697; 8,021,867; 8,119,361; 8,119,381; 8,124,369; and 8,129,134, which are specifically incorporated by reference. In certain embodiments, targeting is effected by a polynucleic acid binding meganuclease fragment. In certain embodiments, targeting is effected by a polynucleic acid binding catalytically inactive meganuclease (fragment). Accordingly in particular embodiments, the targeting domain comprises or consists of a nucleic acid binding meganuclease or a nucleic acid binding fragment thereof.

### CRISPR-Cas Systems

[0311] In certain embodiments, the targeting domain comprises a (modified) CRISPR/Cas complex or system. General information on CRISPR/Cas Systems, components thereof, and delivery of such components, including methods, materials, delivery vehicles, vectors, particles, and making and using thereof, including as to amounts and formulations, as well as CRISPR/Cas-expressing eukaryotic cells, CRISPR/Cas expressing eukaryotes, such as a mouse, is described herein elsewhere. In certain embodiments, targeting is effected by an oligonucleic acid binding CRISPR protein fragment and/or a gRNA. In certain embodiments, targeting is effected by a nucleic acid binding catalytically inactive CRISPR protein (fragment). Accordingly in particular embodiments, the targeting domain comprises oligonucleic acid binding CRISPR protein or an oligonucleic acid binding fragment of a CRISPR protein and/or a gRNA.

[0312] As used herein, the term “Cas” generally refers to a (modified) effector protein of the CRISPR/Cas system or complex, and can be without limitation a (modified) Cas9, or other enzymes such as Cpf1, C2c1, C2c2, C2c3, group 29, or group 30 protein The term “Cas” may be used herein interchangeably with the terms “CRISPR” protein, “CRISPR/Cas protein”, “CRISPR effector”, “CRISPR/Cas effector”, “CRISPR enzyme”, “CRISPR/Cas enzyme” and the like, unless otherwise apparent, such as by specific and exclusive reference to Cas9. It is to be understood that the term “CRISPR protein” may be used interchangeably with “CRISPR enzyme”, irrespective of whether the CRISPR protein has altered, such as increased or decreased (or no) enzymatic activity, compared to the wild type CRISPR protein. Likewise, as used herein, in certain embodiments, where appropriate and which will be apparent to the skilled person, the term “nuclease” may refer to a modified nuclease wherein catalytic activity has been altered, such as having increased or decreased nuclease activity, or no nuclease activity at all, as well as nickase activity, as well as otherwise modified nuclease as defined herein elsewhere, unless otherwise apparent, such as by specific and exclusive reference to unmodified nuclease.

[0313] In some embodiments, the CRISPR effector protein is Cas9, Cpf1, C2c1, C2c2, or Cas13a, Cas13b, Cas13c, or Cas13d. In some embodiments, the CRISPR effector protein is a DNA-targeting CRISPR effector protein. In some embodiments, the CRISPR effector protein is a Type-II CRISPR effector protein such as Cas9. In some embodiments, the CRISPR effector protein is a Type-V CRISPR effector protein such as Cpf1 or C2c1. In some embodiments, the CRISPR effector protein is a RNA-targeting CRISPR effector protein. In some embodiments, the CRISPR effector protein is a Type-VI CRISPR effector protein such as Cas13a, Cas13b, Cas13c, or Cas13d.

[0314] In some embodiments, the CRISPR effector protein is a Cas9, for instance SaCas9, SpCas9, StCas9, CjCas9 and so forth—any ortholog is envisaged. In some embodiments, the CRISPR effector protein is a Cpf1, for instance AsCpf1, LbCpf1, FnCpf1 and so forth—any ortholog is envisaged. In certain embodiments, the targeting component as described herein according to the invention is a (endo)nuclease or a variant thereof having altered or modified activity (i.e. a modified nuclease, as described herein elsewhere). In certain embodiments, said nuclease is a targeted or site-specific or homing nuclease or a variant thereof having altered or modified activity. In certain embodiments, said nuclease or targeted/site-specific/homing nuclease is, comprises, consists essentially of, or consists of a (modified) CRISPR/Cas system or complex, a (modified) Cas protein, a (modified) zinc finger, a (modified) zinc finger nuclease (ZFN), a (modified) transcription factor-like effector (TALE), a (modified) transcription factor-like effector nuclease (TALEN), or a (modified) meganuclease. In certain embodiments, said (modified) nuclease or targeted/site-specific/homing nuclease is, comprises, consists essentially of, or consists of a (modified) RNA-guided nuclease.

[0315] In particular embodiments, more particularly where the nuclease is a CRISPR protein, the targeting domain further comprises a guide molecule which targets a selected nucleic acid. For instance, in the context of the CRISPR/Cas system, the guide RNA is capable of hybridizing with a selected nucleic acid sequence. As uses herein, “hybridization” or “hybridizing” refers to a reaction in which one or more polynucleotides react to form a complex that is stabilized via hydrogen bonding between the bases of the nucleotide residues. The hydrogen bonding may occur by Watson Crick base pairing, Hoogstein binding, or in any other sequence specific manner. The complex may comprise two strands forming a duplex structure, three or more strands forming a multi stranded complex, a single self-hybridizing strand, or any combination of these. A hybridization reaction may constitute a step in a more extensive process, such as the initiation of PGR, or the cleavage of a polynucleotide by an enzyme. A sequence capable of hybridizing with a given sequence is referred to as the “complement” of the given sequence

[0316] In the methods and systems of the present invention use is made of a CRISPR-Cas protein and corresponding guide molecule. More particularly, the CRISPR-Cas protein is a class 2 CRISPR-Cas protein. In certain embodiments, said CRISPR-Cas protein is a Cas13. The CRISPR-Cas system does not require the generation of customized proteins to target specific sequences but rather a single Cas protein can be programmed by guide molecule to recognize a specific nucleic acid target, in other words the Cas enzyme protein can be recruited to a specific nucleic acid target locus of interest using said guide molecule.

[0317] The term “AD-functionalized CRISPR system” as used here refers to a nucleic acid targeting and editing system comprising (a) a CRISPR-Cas protein, more particularly a Cas13 protein which is catalytically inactive; (b) a guide molecule which comprises a guide sequence; and (c) an adenosine deaminase protein or catalytic domain thereof; wherein the adenosine deaminase protein or catalytic domain thereof is covalently or non-covalently linked to the CRISPR-Cas protein or the guide molecule or is adapted to link thereto after delivery; wherein the guide sequence is substantially complementary to the target sequence but comprises a non-pairing C corresponding to the A being targeted for deamination, resulting in an A-C mismatch in an RNA duplex formed by the guide sequence and the target sequence. For application in eukaryotic cells, the CRISPR-Cas protein and/or the adenosine deaminase are preferably NLS-tagged.

[0318] In particular embodiments, the targeting domain is a CRISPR-cas protein. In certain example embodiments, the CRISPR-cas protein is linked to the deaminase protein or its catalytic domain by means of an LEPGEKPYKCPECGKSFSQSGALTRHQRTHTR (SEQ ID No. 11) linker. In further particular embodiments, the CRISPR-Cas protein is linked C-terminally to the N-terminus of a deaminase protein or its catalytic domain by means of an LEPGEKPYKCPECGKSFSQSGALTRHQRTHTR (SEQ ID No. 11) linker. In addition, N- and C-terminal NLSs can also function as linker (e.g., PKKKRKVEASSPKKRKVEAS (SEQ ID No. 16)). In particular embodiments of the methods of the present invention, the adenosine deaminase protein or catalytic domain thereof is delivered to the cell or expressed within the cell as a separate protein, but is modified so as to be able to link to the targeting domain or the guide molecule. In those embodiments in which the targeting domain is a CRISPR-Cas system, the adenosine deaminase may link to either the Cas protein or the guide molecule. In particular embodiments, this is ensured by the use of orthogonal RNA-binding protein or adaptor protein/aptamer combinations that exist within the diversity of bacteriophage coat proteins. Examples of such coat proteins include but are not limited to: MS2, Qβ, F2, GA, fr, JP501, M12, R17, BZ13, JP34, JP500, KU1, M11, MX1, TW18, VK, SP, FI, ID2, NL95, TW19, AP205, ϕCb5, ϕCb8r, ϕCb2r, ϕCb23r, 7s and PRR1. Aptamers can be naturally occurring or synthetic oligonucleotides that have been engineered through repeated rounds of in vitro selection or SELEX (systematic evolution of ligands by exponential enrichment) to bind to a specific target.

[0319] In particular embodiments of the methods and systems of the present invention, the guide molecule is provided with one or more distinct RNA loop(s) or disctinct sequence(s) that can recruit an adaptor protein. For example, a guide molecule may be extended without colliding with the Cas protein by the insertion of distinct RNA loop(s) or distinct sequence(s) that may recruit adaptor proteins that can bind to the distinct RNA loop(s) or distinct sequence(s). Examples of modified guides and their use in recruiting effector domains to the CRISPR-Cas complex are provided in Konermann (Nature 2015, 517(7536): 583-588). In particular embodiments, the aptamer is a minimal hairpin aptamer which selectively binds dimerized MS2 bacteriophage coat proteins in mammalian cells and is introduced into the guide molecule, such as in the stemloop and/or in a tetraloop. In these embodiments, the adenosine deaminase protein is fused to MS2. The adenosine deaminase protein is then co-delivered together with the CRISPR-Cas protein and corresponding guide RNA.

[0320] In some embodiments, the components (a), (b) and (c) are delivered to the cell as a ribonucleoprotein complex. The ribonucleoprotein complex can be delivered via one or more lipid nanoparticles.

[0321] In some embodiments, the components (a), (b) and (c) are delivered to the cell as one or more RNA molecules, such as one or more guide RNAs and one or more mRNA molecules encoding the CRISPR-Cas protein, the adenosine deaminase protein, and optionally the adaptor protein. The RNA molecules can be delivered via one or more lipid nanoparticles.

[0322] In some embodiments, the components (a), (b) and (c) are delivered to the cell as one or more DNA molecules. In some embodiments, the one or more DNA molecules are comprised within one or more vectors such as viral vectors (e.g., AAV). In some embodiments, the one or more DNA molecules comprise one or more regulatory elements operably configured to express the CRISPR-Cas protein, the guide molecule, and the adenosine deaminase protein or catalytic domain thereof, optionally wherein the one or more regulatory elements comprise inducible promoters.

[0323] In some embodiments, the CRISPR-Cas protein is a dead Cas13. In some embodiments, the dead Cas13 is a dead Cas13a protein which comprises one or more mutations in the HEPN domain. In some embodiments, the dead Cas13a comprises a mutation corresponding to R474A and R1046A in Leptotrichia wadei (LwaCas13a). In some embodiments, the dead Cas13 is a dead Cas13b protein which comprises one or more of R116A, H121A, R1177A, H1182A of a Cas13b protein originating from Bergeyella zoohelcum ATCC 43767 or amino acid positions corresponding thereto of a Cas13b ortholog.

[0324] In some embodiments of the guide molecule is capable of hybridizing with a target sequence comprising the Adenine to be deaminated within an RNA sequence to form an RNA duplex which comprises a non-pairing Cytosine opposite to said Adenine. Upon RNA duplex formation, the guide molecule forms a complex with the Cas13 protein and directs the complex to bind the RNA polynucleotide at the target RNA sequence of interest. Details on the aspect of the guide of the AD-functionalized CRISPR-Cas system are provided herein below.

[0325] In some embodiments, a Cas13 guide RNA having a canonical length of, e.g. LawCas13 is used to form an RNA duplex with the target DNA. In some embodiments, a Cas13 guide molecule longer than the canonical length for, e.g. LawCas13a is used to form an RNA duplex with the target DNA including outside of the Cas13-guide RNA-target DNA complex.

[0326] In at least a first design, the AD-functionalized CRISPR system comprises (a) an adenosine deaminase fused or linked to a CRISPR-Cas protein, wherein the CRISPR-Cas protein is catalytically inactive, and (b) a guide molecule comprising a guide sequence designed to introduce an A-C mismatch in an RNA duplex formed between the guide sequence and the target sequence. In some embodiments, the CRISPR-Cas protein and/or the adenosine deaminase are NLS-tagged, on either the N- or C-terminus or both.

[0327] In at least a second design, the AD-functionalized CRISPR system comprises (a) a CRISPR-Cas protein that is catalytically inactive, (b) a guide molecule comprising a guide sequence designed to introduce an A-C mismatch in an RNA duplex formed between the guide sequence and the target sequence, and an aptamer sequence (e.g., MS2 RNA motif or PP7 RNA motif) capable of binding to an adaptor protein (e.g., MS2 coating protein or PP7 coat protein), and (c) an adenosine deaminase fused or linked to an adaptor protein, wherein the binding of the aptamer and the adaptor protein recruits the adenosine deaminase to the RNA duplex formed between the guide sequence and the target sequence for targeted deamination at the A of the A-C mismatch. In some embodiments, the adaptor protein and/or the adenosine deaminase are NLS-tagged, on either the N- or C-terminus or both. The CRISPR-Cas protein can also be NLS-tagged.

[0328] The use of different aptamers and corresponding adaptor proteins also allows orthogonal gene editing to be implemented. In one example in which adenosine deaminase are used in combination with cytidine deaminase for orthogonal gene editing/deamination, sgRNA targeting different loci are modified with distinct RNA loops in order to recruit MS2-adenosine deaminase and PP7-cytidine deaminase (or PP7-adenosine deaminase and MS2-cytidine deaminase), respectively, resulting in orthogonal deamination of A or C at the target loci of interested, respectively. PP7 is the RNA-binding coat protein of the bacteriophage Pseudomonas. Like MS2, it binds a specific RNA sequence and secondary structure. The PP7 RNA-recognition motif is distinct from that of MS2. Consequently, PP7 and MS2 can be multiplexed to mediate distinct effects at different genomic loci simultaneously. For example, an sgRNA targeting locus A can be modified with MS2 loops, recruiting MS2-adenosine deaminase, while another sgRNA targeting locus B can be modified with PP7 loops, recruiting PP7-cytidine deaminase. In the same cell, orthogonal, locus-specific modifications are thus realized. This principle can be extended to incorporate other orthogonal RNA-binding proteins.

[0329] In at least a third design, the AD-functionalized CRISPR system comprises (a) an adenosine deaminase inserted into an internal loop or unstructured region of a CRISPR-Cas protein, wherein the CRISPR-Cas protein is catalytically inactive or a nickase, and (b) a guide molecule comprising a guide sequence designed to introduce an A-C mismatch in an RNA duplex formed between the guide sequence and the target sequence.

[0330] CRISPR-Cas protein split sites that are suitable for inseration of adenosine deaminase can be identified with the help of a crystal structure. One can use the crystal structure of an ortholog if a relatively high degree of homology exists between the ortholog and the intended CRISPR-Cas protein.

[0331] The split position may be located within a region or loop. Preferably, the split position occurs where an interruption of the amino acid sequence does not result in the partial or full destruction of a structural feature (e.g. alpha-helixes or β-sheets). Unstructured regions (regions that did not show up in the crystal structure because these regions are not structured enough to be “frozen” in a crystal) are often preferred options. The positions within the unstructured regions or outside loops may not need to be exactly the numbers provided above, but may vary by, for example 1, 2, 3, 4, 5, 6, 7, 8, 9, or even 10 amino acids either side of the position given above, depending on the size of the loop, so long as the split position still falls within an unstructured region of outside loop.

[0332] The AD-functionalized CRISPR system described herein can be used to target a specific Adenine or Cytidine within an RNA polynucleotide sequence for deamination. For example, the guide molecule can form a complex with the CRISPR-Cas protein and directs the complex to bind a target RNA sequence in the RNA polynucleotide of interest. In certain example embodiments, because the guide sequence is designed to have a non-pairing C, the RNA duplex formed between the guide sequence and the target sequence comprises an A-C mismatch, which directs the adenosine deaminase to contact and deaminate the A opposite to the non-pairing C, converting it to a Inosine (I). Since Inosine (I) base pairs with C and functions like G in cellular process, the targeted deamination of A described herein are useful for correction of undesirable G-A and C-T mutations, as well as for obtaining desirable A-G and T-C mutations.

[0333] In some embodiments, the AD-functionalized CRISPR system is used for targeted deamination in an RNA polynucleotide molecule in vitro. In some embodiments, the AD-functionalized CRISPR system is used for targeted deamination in a DNA molecule within a cell. The cell can be a eukaryotic cell, such as a animal cell, a mammalian cell, a human, or a plant cell.

### Guide Molecule

[0334] The guide molecule or guide RNA of a Class 2 type V CRISPR-Cas protein comprises a tracr-mate sequence (encompassing a “direct repeat” in the context of an endogenous CRISPR system) and a guide sequence (also referred to as a “spacer” in the context of an endogenous CRISPR system). Indeed, in contrast to the type II CRISPR-Cas proteins, the Cas13 protein does not rely on the presence of a tracr sequence. In some embodiments, the CRISPR-Cas system or complex as described herein does not comprise and/or does not rely on the presence of a tracr sequence (e.g. if the Cas protein is Cas13). In certain embodiments, the guide molecule may comprise, consist essentially of, or consist of a direct repeat sequence fused or linked to a guide sequence or spacer sequence.

[0335] In general, a CRISPR system is characterized by elements that promote the formation of a CRISPR complex at the site of a target sequence. In the context of formation of a CRISPR complex, “target sequence” refers to a sequence to which a guide sequence is designed to have complementarity, where hybridization between a target DNA sequence and a guide sequence promotes the formation of a CRISPR complex.

[0336] The terms “guide molecule” and “guide RNA” are used interchangeably herein to refer to RNA-based molecules that are capable of forming a complex with a CRISPR-Cas protein and comprises a guide sequence having sufficient complementarity with a target nucleic acid sequence to hybridize with the target nucleic acid sequence and direct sequence-specific binding of the complex to the target nucleic acid sequence. The guide molecule or guide RNA specifically encompasses RNA-based molecules having one or more chemically modifications (e.g., by chemical linking two ribonucleotides or by replacement of one or more ribonucleotides with one or more deoxyribonucleotides), as described herein.

[0337] As used herein, the term “crRNA” or “guide RNA” or “single guide RNA” or “sgRNA” or “one or more nucleic acid components” of a Type V or Type VI CRISPR-Cas locus effector protein comprises any polynucleotide sequence having sufficient complementarity with a target nucleic acid sequence to hybridize with the target nucleic acid sequence and direct sequence-specific binding of a nucleic acid-targeting complex to the target nucleic acid sequence. In some embodiments, the degree of complementarity, when optimally aligned using a suitable alignment algorithm, is about or more than about 50%, 60%, 75%, 80%, 85%, 90%, 95%, 97.5%, 99%, or more. Optimal alignment may be determined with the use of any suitable algorithm for aligning sequences, non-limiting example of which include the Smith-Waterman algorithm, the Needleman-Wunsch algorithm, algorithms based on the Burrows-Wheeler Transform (e.g., the Burrows Wheeler Aligner), ClustalW, Clustal X, BLAT, Novoalign (Novocraft Technologies; available at www.novocraft.com), ELAND (Illumina, San Diego, Calif.), SOAP (available at soap.genomics.org.cn), and Maq (available at maq.sourceforge.net). The ability of a guide sequence (within a nucleic acid-targeting guide RNA) to direct sequence-specific binding of a nucleic acid-targeting complex to a target nucleic acid sequence may be assessed by any suitable assay. For example, the components of a nucleic acid-targeting CRISPR system sufficient to form a nucleic acid-targeting complex, including the guide sequence to be tested, may be provided to a host cell having the corresponding target nucleic acid sequence, such as by transfection with vectors encoding the components of the nucleic acid-targeting complex, followed by an assessment of preferential targeting (e.g., cleavage) within the target nucleic acid sequence, such as by Surveyor assay as described herein. Similarly, cleavage of a target nucleic acid sequence may be evaluated in a test tube by providing the target nucleic acid sequence, components of a nucleic acid-targeting complex, including the guide sequence to be tested and a control guide sequence different from the test guide sequence, and comparing binding or rate of cleavage at the target sequence between the test and control guide sequence reactions. Other assays are possible, and will occur to those skilled in the art. A guide sequence, and hence a nucleic acid-targeting guide may be selected to target any target nucleic acid sequence. The target sequence may be DNA. The target sequence may be any RNA sequence. In some embodiments, the target sequence may be a sequence within a RNA molecule selected from the group consisting of messenger RNA (mRNA), pre-mRNA, ribosomal RNA (rRNA), transfer RNA (tRNA), micro-RNA (miRNA), small interfering RNA (siRNA), small nuclear RNA (snRNA), small nucleolar RNA (snoRNA), double stranded RNA (dsRNA), non-coding RNA (ncRNA), long non-coding RNA (lncRNA), and small cytoplasmatic RNA (scRNA). In some preferred embodiments, the target sequence may be a sequence within a RNA molecule selected from the group consisting of mRNA, pre-mRNA, and rRNA. In some preferred embodiments, the target sequence may be a sequence within a RNA molecule selected from the group consisting of ncRNA, and lncRNA. In some more preferred embodiments, the target sequence may be a sequence within an mRNA molecule or a pre-mRNA molecule.

[0338] In some embodiments, the guide molecule comprises a guide sequence that is designed to have at least one mismatch with the target sequence, such that an RNA duplex formed between the guide sequence and the target sequence comprises a non-pairing C in the guide sequence opposite to the target A for deamination on the target sequence. In some embodiments, aside from this A-C mismatch, the degree of complementarity, when optimally aligned using a suitable alignment algorithm, is about or more than about 50%, 60%, 75%, 80%, 85%, 90%, 95%, 97.5%, 99%, or more.

[0339] As used herein, the term “crRNA” or “guide RNA” or “single guide RNA” or “sgRNA” or “one or more nucleic acid components” of a Type V or Type VI CRISPR-Cas locus effector protein comprises any polynucleotide sequence having sufficient complementarity with a target nucleic acid sequence to hybridize with the target nucleic acid sequence and direct sequence-specific binding of a nucleic acid-targeting complex to the target nucleic acid sequence. In some embodiments, the degree of complementarity, when optimally aligned using a suitable alignment algorithm, is about or more than about 50%, 60%, 75%, 80%, 85%, 90%, 95%, 97.5%, 99%, or more. Optimal alignment may be determined with the use of any suitable algorithm for aligning sequences, non-limiting example of which include the Smith-Waterman algorithm, the Needleman-Wunsch algorithm, algorithms based on the Burrows-Wheeler Transform (e.g., the Burrows Wheeler Aligner), ClustalW, Clustal X, BLAT, Novoalign (Novocraft Technologies; available at www.novocraft.com), ELAND (Illumina, San Diego, Calif.), SOAP (available at soap.genomics.org.cn), and Maq (available at maq.sourceforge.net). The ability of a guide sequence (within a nucleic acid-targeting guide RNA) to direct sequence-specific binding of a nucleic acid-targeting complex to a target nucleic acid sequence may be assessed by any suitable assay. For example, the components of a nucleic acid-targeting CRISPR system sufficient to form a nucleic acid-targeting complex, including the guide sequence to be tested, may be provided to a host cell having the corresponding target nucleic acid sequence, such as by transfection with vectors encoding the components of the nucleic acid-targeting complex, followed by an assessment of preferential targeting (e.g., cleavage) within the target nucleic acid sequence, such as by Surveyor assay as described herein. Similarly, cleavage of a target nucleic acid sequence may be evaluated in a test tube by providing the target nucleic acid sequence, components of a nucleic acid-targeting complex, including the guide sequence to be tested and a control guide sequence different from the test guide sequence, and comparing binding or rate of cleavage at the target sequence between the test and control guide sequence reactions. Other assays are possible, and will occur to those skilled in the art. A guide sequence, and hence a nucleic acid-targeting guide may be selected to target any target nucleic acid sequence. The target sequence may be DNA. The target sequence may be any RNA sequence. In some embodiments, the target sequence may be a sequence within a RNA molecule selected from the group consisting of messenger RNA (mRNA), pre-mRNA, ribosomal RNA (rRNA), transfer RNA (tRNA), micro-RNA (miRNA), small interfering RNA (siRNA), small nuclear RNA (snRNA), small nucleolar RNA (snoRNA), double stranded RNA (dsRNA), non-coding RNA (ncRNA), long non-coding RNA (lncRNA), and small cytoplasmatic RNA (scRNA). In some preferred embodiments, the target sequence may be a sequence within a RNA molecule selected from the group consisting of mRNA, pre-mRNA, and rRNA. In some preferred embodiments, the target sequence may be a sequence within a RNA molecule selected from the group consisting of ncRNA, and lncRNA. In some more preferred embodiments, the target sequence may be a sequence within an mRNA molecule or a pre-mRNA molecule.

[0340] In some embodiments, a nucleic acid-targeting guide is selected to reduce the degree secondary structure within the nucleic acid-targeting guide. In some embodiments, about or less than about 75%, 50%, 40%, 30%, 25%, 20%, 15%, 10%, 5%, 1%, or fewer of the nucleotides of the nucleic acid-targeting guide participate in self-complementary base pairing when optimally folded. Optimal folding may be determined by any suitable polynucleotide folding algorithm. Some programs are based on calculating the minimal Gibbs free energy. An example of one such algorithm is mFold, as described by Zuker and Stiegler (Nucleic Acids Res. 9(1981), 133-148). Another example folding algorithm is the online webserver RNAfold, developed at Institute for Theoretical Chemistry at the University of Vienna, using the centroid structure prediction algorithm (see e.g., A. R. Gruber et al., 2008, Cell 106(1): 23-24; and PA Carr and GM Church, 2009, Nature Biotechnology 27(12): 1151-62).

[0341] In certain embodiments, a guide RNA or crRNA may comprise, consist essentially of, or consist of a direct repeat (DR) sequence and a guide sequence or spacer sequence. In certain embodiments, the guide RNA or crRNA may comprise, consist essentially of, or consist of a direct repeat sequence fused or linked to a guide sequence or spacer sequence. In certain embodiments, the direct repeat sequence may be located upstream (i.e., 5′) from the guide sequence or spacer sequence. In other embodiments, the direct repeat sequence may be located downstream (i.e., 3′) from the guide sequence or spacer sequence.

[0342] In certain embodiments, the crRNA comprises a stem loop, preferably a single stem loop. In certain embodiments, the direct repeat sequence forms a stem loop, preferably a single stem loop.

[0343] In certain embodiments, the spacer length of the guide RNA is from 15 to 35 nt. In certain embodiments, the spacer length of the guide RNA is at least 15 nucleotides. In certain embodiments, the spacer length is from 15 to 17 nt, e.g., 15, 16, or 17 nt, from 17 to 20 nt, e.g., 17, 18, 19, or 20 nt, from 20 to 24 nt, e.g., 20, 21, 22, 23, or 24 nt, from 23 to 25 nt, e.g., 23, 24, or 25 nt, from 24 to 27 nt, e.g., 24, 25, 26, or 27 nt, from 27-30 nt, e.g., 27, 28, 29, or 30 nt, from 30-35 nt, e.g., 30, 31, 32, 33, 34, or 35 nt, or 35 nt or longer.

[0344] The “tracrRNA” sequence or analogous terms includes any polynucleotide sequence that has sufficient complementarity with a crRNA sequence to hybridize. In some embodiments, the degree of complementarity between the tracrRNA sequence and crRNA sequence along the length of the shorter of the two when optimally aligned is about or more than about 25%, 30%, 40%, 50%, 60%, 70%, 80%, 90%, 95%, 97.5% 99%, or higher. In some embodiments, the tracr sequence is about or more than about 5, 6, 7, 8, 9, 10, 11, 12, 13, 14, 15, 16, 17, 18, 19, 20, 25, 30, 40, 50, or more nucleotides in length. In some embodiments, the tracr sequence and crRNA sequence are contained within a single transcript, such that hybridization between the two produces a transcript having a secondary structure, such as a hairpin. In an embodiment of the invention, the transcript or transcribed polynucleotide sequence has at least two or more hairpins. In preferred embodiments, the transcript has two, three, four or five hairpins. In a further embodiment of the invention, the transcript has at most five hairpins. In a hairpin structure the portion of the sequence 5′ of the final “N” and upstream of the loop corresponds to the tracr mate sequence, and the portion of the sequence 3′ of the loop corresponds to the tracr sequence.

[0345] In general, degree of complementarity is with reference to the optimal alignment of the sca sequence and tracr sequence, along the length of the shorter of the two sequences. Optimal alignment may be determined by any suitable alignment algorithm, and may further account for secondary structures, such as self-complementarity within either the sca sequence or tracr sequence. In some embodiments, the degree of complementarity between the tracr sequence and sca sequence along the length of the shorter of the two when optimally aligned is about or more than about 25%, 30%, 40%, 50%, 60%, 70%, 80%, 90%, 95%, 97.5%, 99%, or higher.

[0346] In general, the CRISPR-Cas or CRISPR system may be as used in the foregoing documents, such as WO 2014/093622 (PCT/US2013/074667) and refers collectively to transcripts and other elements involved in the expression of or directing the activity of CRISPR-associated (“Cas”) genes, including sequences encoding a Cas gene, in particular a Cas13 gene in the case of CRISPR-Cas13, a tracr (trans-activating CRISPR) sequence (e.g. tracrRNA or an active partial tracrRNA), a tracr-mate sequence (encompassing a “direct repeat” and a tracrRNA-processed partial direct repeat in the context of an endogenous CRISPR system), a guide sequence (also referred to as a “spacer” in the context of an endogenous CRISPR system), or “RNA(s)” as that term is herein used (e.g., RNA(s) to guide Cas13, e.g. CRISPR RNA and transactivating (tracr) RNA or a single guide RNA (sgRNA) (chimeric RNA)) or other sequences and transcripts from a CRISPR locus. In general, a CRISPR system is characterized by elements that promote the formation of a CRISPR complex at the site of a target sequence (also referred to as a protospacer in the context of an endogenous CRISPR system). In the context of formation of a CRISPR complex, “target sequence” refers to a sequence to which a guide sequence is designed to have complementarity, where hybridization between a target sequence and a guide sequence promotes the formation of a CRISPR complex. The section of the guide sequence through which complementarity to the target sequence is important for cleavage activity is referred to herein as the seed sequence. A target sequence may comprise any polynucleotide, such as DNA or RNA polynucleotides. In some embodiments, a target sequence is located in the nucleus or cytoplasm of a cell, and may include nucleic acids in or from mitochondrial, organelles, vesicles, liposomes or particles present within the cell. In some embodiments, especially for non-nuclear uses, NLSs are not preferred. In some embodiments, a CRISPR system comprises one or more nuclear exports signals (NESs). In some embodiments, a CRISPR system comprises one or more NLSs and one or more NESs. In some embodiments, direct repeats may be identified in silico by searching for repetitive motifs that fulfill any or all of the following criteria: 1. found in a 2 Kb window of genomic sequence flanking the type II CRISPR locus; 2. span from 20 to 50 bp; and 3. interspaced by 20 to 50 bp. In some embodiments, 2 of these criteria may be used, for instance 1 and 2, 2 and 3, or 1 and 3. In some embodiments, all 3 criteria may be used.

[0347] In embodiments of the invention the terms guide sequence and guide RNA, i.e. RNA capable of guiding Cas to a target genomic locus, are used interchangeably as in foregoing cited documents such as WO 2014/093622 (PCT/US2013/074667). In general, a guide sequence is any polynucleotide sequence having sufficient complementarity with a target polynucleotide sequence to hybridize with the target sequence and direct sequence-specific binding of a CRISPR complex to the target sequence. In some embodiments, the degree of complementarity between a guide sequence and its corresponding target sequence, when optimally aligned using a suitable alignment algorithm, is about or more than about 50%, 60%, 75%, 80%, 85%, 90%, 95%, 97.5%, 99%, or more. Optimal alignment may be determined with the use of any suitable algorithm for aligning sequences, non-limiting example of which include the Smith-Waterman algorithm, the Needleman-Wunsch algorithm, algorithms based on the Burrows-Wheeler Transform (e.g. the Burrows Wheeler Aligner), ClustalW, Clustal X, BLAT, Novoalign (Novocraft Technologies; available at www.novocraft.com), ELAND (Illumina, San Diego, Calif.), SOAP (available at soap.genomics.org.cn), and Maq (available at maq.sourceforge.net). In some embodiments, a guide sequence is about or more than about 5, 10, 11, 12, 13, 14, 15, 16, 17, 18, 19, 20, 21, 22, 23, 24, 25, 26, 27, 28, 29, 30, 35, 40, 45, 50, 75, or more nucleotides in length. In some embodiments, a guide sequence is less than about 75, 50, 45, 40, 35, 30, 25, 20, 15, 12, or fewer nucleotides in length. Preferably the guide sequence is 10 30 nucleotides long. The ability of a guide sequence to direct sequence-specific binding of a CRISPR complex to a target sequence may be assessed by any suitable assay. For example, the components of a CRISPR system sufficient to form a CRISPR complex, including the guide sequence to be tested, may be provided to a host cell having the corresponding target sequence, such as by transfection with vectors encoding the components of the CRISPR sequence, followed by an assessment of preferential cleavage within the target sequence, such as by Surveyor assay as described herein. Similarly, cleavage of a target polynucleotide sequence may be evaluated in a test tube by providing the target sequence, components of a CRISPR complex, including the guide sequence to be tested and a control guide sequence different from the test guide sequence, and comparing binding or rate of cleavage at the target sequence between the test and control guide sequence reactions. Other assays are possible, and will occur to those skilled in the art.

[0348] In some embodiments of CRISPR-Cas systems, the degree of complementarity between a guide sequence and its corresponding target sequence can be about or more than about 50%, 60%, 75%, 80%, 85%, 90%, 95%, 97.5%, 99%, or 100%; a guide or RNA or sgRNA can be about or more than about 5, 10, 11, 12, 13, 14, 15, 16, 17, 18, 19, 20, 21, 22, 23, 24, 25, 26, 27, 28, 29, 30, 35, 40, 45, 50, 75, or more nucleotides in length; or guide or RNA or sgRNA can be less than about 75, 50, 45, 40, 35, 30, 25, 20, 15, 12, or fewer nucleotides in length; and advantageously tracr RNA is 30 or 50 nucleotides in length. However, an aspect of the invention is to reduce off-target interactions, e.g., reduce the guide interacting with a target sequence having low complementarity. Indeed, in the examples, it is shown that the invention involves mutations that result in the CRISPR-Cas system being able to distinguish between target and off-target sequences that have greater than 80% to about 95% complementarity, e.g., 83%-84% or 88-89% or 94-95% complementarity (for instance, distinguishing between a target having 18 nucleotides from an off-target of 18 nucleotides having 1, 2 or 3 mismatches). Accordingly, in the context of the present invention the degree of complementarity between a guide sequence and its corresponding target sequence is greater than 94.5% or 95% or 95.5% or 96% or 96.5% or 97% or 97.5% or 98% or 98.5% or 99% or 99.5% or 99.9%, or 100%. Off target is less than 100% or 99.9% or 99.5% or 99% or 99% or 98.5% or 98% or 97.5% or 97% or 96.5% or 96% or 95.5% or 95% or 94.5% or 94% or 93% or 92% or 91% or 90% or 89% or 88% or 87% or 86% or 85% or 84% or 83% or 82% or 81% or 80% complementarity between the sequence and the guide, with it advantageous that off target is 100% or 99.9% or 99.5% or 99% or 99% or 98.5% or 98% or 97.5% or 97% or 96.5% or 96% or 95.5% or 95% or 94.5% complementarity between the sequence and the guide.

[0349] In particularly preferred embodiments according to the invention, the guide RNA (capable of guiding Cas to a target locus) may comprise (1) a guide sequence capable of hybridizing to a genomic target locus in the eukaryotic cell; (2) a tracr sequence; and (3) a tracr mate sequence. All (1) to (3) may reside in a single RNA, i.e. an sgRNA (arranged in a 5′ to 3′ orientation), or the tracr RNA may be a different RNA than the RNA containing the guide and tracr sequence. The tracr hybridizes to the tracr mate sequence and directs the CRISPR/Cas complex to the target sequence. Where the tracr RNA is on a different RNA than the RNA containing the guide and tracr sequence, the length of each RNA may be optimized to be shortened from their respective native lengths, and each may be independently chemically modified to protect from degradation by cellular RNase or otherwise increase stability.

[0350] The methods according to the invention as described herein comprehend inducing one or more mutations in a eukaryotic cell (in vitro, i.e. in an isolated eukaryotic cell) as herein discussed comprising delivering to cell a vector as herein discussed. The mutation(s) can include the introduction, deletion, or substitution of one or more nucleotides at each target sequence of cell(s) via the guide(s) RNA(s) or sgRNA(s). The mutations can include the introduction, deletion, or substitution of 1-75 nucleotides at each target sequence of said cell(s) via the guide(s) RNA(s) or sgRNA(s). The mutations can include the introduction, deletion, or substitution of 1, 5, 10, 11, 12, 13, 14, 15, 16, 17, 18, 19, 20, 21, 22, 23, 24, 25, 26, 27, 28, 29, 30, 35, 40, 45, 50, or 75 nucleotides at each target sequence of said cell(s) via the guide(s) RNA(s) or sgRNA(s). The mutations can include the introduction, deletion, or substitution of 5, 10, 11, 12, 13, 14, 15, 16, 17, 18, 19, 20, 21, 22, 23, 24, 25, 26, 27, 28, 29, 30, 35, 40, 45, 50, or 75 nucleotides at each target sequence of said cell(s) via the guide(s) RNA(s) or sgRNA(s). The mutations include the introduction, deletion, or substitution of 10, 11, 12, 13, 14, 15, 16, 17, 18, 19, 20, 21, 22, 23, 24, 25, 26, 27, 28, 29, 30, 35, 40, 45, 50, or 75 nucleotides at each target sequence of said cell(s) via the guide(s) RNA(s) or sgRNA(s). The mutations can include the introduction, deletion, or substitution of 20, 21, 22, 23, 24, 25, 26, 27, 28, 29, 30, 35, 40, 45, 50, or 75 nucleotides at each target sequence of said cell(s) via the guide(s) RNA(s) or sgRNA(s). The mutations can include the introduction, deletion, or substitution of 40, 45, 50, 75, 100, 200, 300, 400 or 500 nucleotides at each target sequence of said cell(s) via the guide(s) RNA(s) or sgRNA(s).

[0351] For minimization of toxicity and off-target effect, it may be important to control the concentration of Cas mRNA and guide RNA delivered. Optimal concentrations of Cas mRNA and guide RNA can be determined by testing different concentrations in a cellular or non-human eukaryote animal model and using deep sequencing the analyze the extent of modification at potential off-target genomic loci. Alternatively, to minimize the level of toxicity and off-target effect, Cas nickase mRNA (for example S. pyogenes Cas9 with the D10A mutation) can be delivered with a pair of guide RNAs targeting a site of interest. Guide sequences and strategies to minimize toxicity and off-target effects can be as in WO 2014/093622 (PCT/US2013/074667); or, via mutation as herein.

[0352] Typically, in the context of an endogenous CRISPR system, formation of a CRISPR complex (comprising a guide sequence hybridized to a target sequence and complexed with one or more Cas proteins) results in cleavage of one or both strands in or near (e.g. within 1, 2, 3, 4, 5, 6, 7, 8, 9, 10, 20, 50, or more base pairs from) the target sequence. Without wishing to be bound by theory, the tracr sequence, which may comprise or consist of all or a portion of a wild-type tracr sequence (e.g. about or more than about 20, 26, 32, 45, 48, 54, 63, 67, 85, or more nucleotides of a wild-type tracr sequence), may also form part of a CRISPR complex, such as by hybridization along at least a portion of the tracr sequence to all or a portion of a tracr mate sequence that is operably linked to the guide sequence.

### Guide Modifications

[0353] In certain embodiments, guides of the invention comprise non-naturally occurring nucleic acids and/or non-naturally occurring nucleotides and/or nucleotide analogs, and/or chemically modifications. Non-naturally occurring nucleic acids can include, for example, mixtures of naturally and non-naturally occurring nucleotides. Non-naturally occurring nucleotides and/or nucleotide analogs may be modified at the ribose, phosphate, and/or base moiety. In an embodiment of the invention, a guide nucleic acid comprises ribonucleotides and non-ribonucleotides. In one such embodiment, a guide comprises one or more ribonucleotides and one or more deoxyribonucleotides. In an embodiment of the invention, the guide comprises one or more non-naturally occurring nucleotide or nucleotide analog such as a nucleotide with phosphorothioate linkage, boranophosphate linkage, a locked nucleic acid (LNA) nucleotides comprising a methylene bridge between the 2,A≤ and 4,A≤carbons of the ribose ring, peptide nucleic acids (PNA), or bridged nucleic acids (BNA). Other examples of modified nucleotides include 2′-O-methyl analogs, 2′-deoxy analogs, 2-thiouridine analogs, N6-methyladenosine analogs, or 2′-fluoro analogs. Further examples of modified nucleotides include linkage of chemical moieties at the 2′ position, including but not limited to peptides, nuclear localization sequence (NLS), peptide nucleic acid (PNA), polyethylene glycol (PEG), triethylene glycol, or tetraethyleneglycol (TEG). Further examples of modified bases include, but are not limited to, 2-aminopurine, 5-bromo-uridine, pseudouridine (E®), N1-methylpseudouridine (melE®), 5-methoxyuridine (5moU), inosine, 7-methylguanosine. Examples of guide RNA chemical modifications include, without limitation, incorporation of 2′-O-methyl (M), 2′-O-methyl-3′-phosphorothioate (MS), phosphorothioate (PS), S-constrained ethyl (cEt), 2′-O-methyl-3′-thioPACE (MSP), or 2′-O-methyl-3′-phosphonoacetate (MP) at one or more terminal nucleotides. Such chemically modified guides can comprise increased stability and increased activity as compared to unmodified guides, though on-target vs. off-target specificity is not predictable. (See, Hendel, 2015, Nat Biotechnol. 33(9):985-9, doi: 10.1038/nbt.3290, published online 29 Jun. 2015; Ragdarm et al., 0215, PNAS, E7110-E7111; Allerson et al., J. Med. Chem. 2005, 48:901-904; Bramsen et al., Front. Genet., 2012, 3:154; Deng et al., PNAS, 2015, 112:11870-11875; Sharma et al., Med Chem Comm., 2014, 5:1454-1471; Hendel et al., Nat. Biotechnol. (2015) 33(9): 985-989; Li et al., Nature Biomedical Engineering, 2017, 1, 0066 DOI:10.1038/s41551-017-0066; Ryan et al., Nucleic Acids Res. (2018) 46(2): 792-803). In some embodiments, the 5′ and/or 3′ end of a guide RNA is modified by a variety of functional moieties including fluorescent dyes, polyethylene glycol, cholesterol, proteins, or detection tags. (See Kelly et al., 2016, J. Biotech. 233:74-83). In certain embodiments, a guide comprises ribonucleotides in a region that binds to a target DNA and one or more deoxyribonucletides and/or nucleotide analogs in a region that binds to Cas9, Cpf1, C2c1, or Cas13. In an embodiment of the invention, deoxyribonucleotides and/or nucleotide analogs are incorporated in engineered guide structures, such as, without limitation, 5′ and/or 3′ end, stem-loop regions, and the seed region. In certain embodiments, the modification is not in the 5′-handle of the stem-loop regions. Chemical modification in the 5′-handle of the stem-loop region of a guide may abolish its function (see Li, et al., Nature Biomedical Engineering, 2017, 1:0066). In certain embodiments, at least 1, 2, 3, 4, 5, 6, 7, 8, 9, 10, 11, 12, 13, 14, 15, 16, 17, 18, 19, 20, 21, 22, 23, 24, 25, 26, 27, 28, 29, 30, 35, 40, 45, 50, or 75 nucleotides of a guide is chemically modified. In some embodiments, 3-5 nucleotides at either the 3′ or the 5′ end of a guide is chemically modified. In some embodiments, only minor modifications are introduced in the seed region, such as 2′-F modifications. In some embodiments, 2′-F modification is introduced at the 3′ end of a guide. In certain embodiments, three to five nucleotides at the 5′ and/or the 3′ end of the guide are chemically modified with 2′-O-methyl (M), 2′-O-methyl-3′-phosphorothioate (MS), S-constrained ethyl(cEt), 2′-O-methyl-3′-thioPACE (MSP), or 2′-O-methyl-3′-phosphonoacetate (MP). Such modification can enhance genome editing efficiency (see Hendel et al., Nat. Biotechnol. (2015) 33(9): 985-989; Ryan et al., Nucleic Acids Res. (2018) 46(2): 792-803). In certain embodiments, all of the phosphodiester bonds of a guide are substituted with phosphorothioates (PS) for enhancing levels of gene disruption. In certain embodiments, more than five nucleotides at the 5′ and/or the 3′ end of the guide are chemically modified with 2′-O-Me, 2′-F or S-constrained ethyl(cEt). Such chemically modified guide can mediate enhanced levels of gene disruption (see Ragdarm et al., 0215, PNAS, E7110-E7111). In an embodiment of the invention, a guide is modified to comprise a chemical moiety at its 3′ and/or 5′ end. Such moieties include, but are not limited to amine, azide, alkyne, thio, dibenzocyclooctyne (DBCO), Rhodamine, peptides, nuclear localization sequence (NLS), peptide nucleic acid (PNA), polyethylene glycol (PEG), triethylene glycol, or tetraethyleneglycol (TEG). In certain embodiment, the chemical moiety is conjugated to the guide by a linker, such as an alkyl chain. In certain embodiments, the chemical moiety of the modified guide can be used to attach the guide to another molecule, such as DNA, RNA, protein, or nanoparticles. Such chemically modified guide can be used to identify or enrich cells generically edited by a CRISPR system (see Lee et al., eLife, 2017, 6:e25312, DOI:10.7554). In some embodiments, 3 nucleotides at each of the 3′ and 5′ ends are chemically modified. In a specific embodiment, the modifications comprise 2′-O-methyl or phosphorothioate analogs. In a specific embodiment, 12 nucleotides in the tetraloop and 16 nucleotides in the stem-loop region are replaced with 2′-O-methyl analogs. Such chemical modifications improve in vivo editing and stability (see Finn et al., Cell Reports (2018), 22: 2227-2235). In some embodiments, more than 60 or 70 nucleotides of the guide are chemically modified. In some embodiments, this modification comprises replacement of nucleotides with 2′-O-methyl or 2′-fluoro nucleotide analogs or phosphorothioate (PS) modification of phosphodiester bonds. In some embodiments, the chemical modification comprises 2′-O-methyl or 2′-fluoro modification of guide nucleotides extending outside of the nuclease protein when the CRISPR complex is formed or PS modification of 20 to 30 or more nucleotides of the 3′-terminus of the guide. In a particular embodiment, the chemical modification further comprises 2′-O-methyl analogs at the 5′ end of the guide or 2′-fluoro analogs in the seed and tail regions. Such chemical modifications improve stability to nuclease degradation and maintain or enhance genome-editing activity or efficiency, but modification of all nucleotides may abolish the function of the guide (see Yin et al., Nat. Biotech. (2018), 35(12): 1179-1187). Such chemical modifications may be guided by knowledge of the structure of the CRISPR complex, including knowledge of the limited number of nuclease and RNA 2′-OH interactions (see Yin et al., Nat. Biotech. (2018), 35(12): 1179-1187). In some embodiments, one or more guide RNA nucleotides may be replaced with DNA nucleotides. In some embodiments, up to 2, 4, 6, 8, 10, or 12 RNA nucleotides of the 5′-end tail/seed guide region are replaced with DNA nucleotides. In certain embodiments, the majority of guide RNA nucleotides at the 3′ end are replaced with DNA nucleotides. In particular embodiments, 16 guide RNA nucleotides at the 3′ end are replaced with DNA nucleotides. In particular embodiments, 8 guide RNA nucleotides of the 5′-end tail/seed region and 16 RNA nucleotides at the 3′ end are replaced with DNA nucleotides. In particular embodiments, guide RNA nucleotides that extend outside of the nuclease protein when the CRISPR complex is formed are replaced with DNA nucleotides. Such replacement of multiple RNA nucleotides with DNA nucleotides leads to decreased off-target activity but similar on-target activity compared to an unmodified guide; however, replacement of all RNA nucleotides at the 3′ end may abolish the function of the guide (see Yin et al., Nat. Chem. Biol. (2018) 14, 311-316). Such modifications may be guided by knowledge of the structure of the CRISPR complex, including knowledge of the limited number of nuclease and RNA 2′-OH interactions (see Yin et al., Nat. Chem. Biol. (2018) 14, 311-316).

[0354] In one aspect of the invention, the guide comprises a modified crRNA for Cpf1, having a 5′-handle and a guide segment further comprising a seed region and a 3′-terminus. In some embodiments, the modified guide can be used with a Cpf1 of any one of Acidaminococcus sp. BV3L6 Cpf1 (AsCpf1); Francisella tularensis subsp. Novicida Ul12 Cpf1 (FnCpf1); L. bacterium MC2017 Cpf1 (Lb3Cpf1); Butyrivibrio proteoclasticus Cpf1 (BpCpf1); Parcubacteria bacterium GWC2011_GWC2_44_17 Cpf1 (PbCpf1); Peregrinibacteria bacterium GW2011_GWA_33_10 Cpf1 (PeCpf1); Leptospira inadai Cpf1 (LiCpf1); Smithella sp. SC_K08D17 Cpf1 (SsCpf1); L. bacterium MA2020 Cpf1 (Lb2Cpf1); Porphyromonas crevioricanis Cpf1 (PcCpf1); Porphyromonas macacae Cpf1 (PmCpf1); Candidatus Methanoplasma termitum Cpf1 (CMtCpf1); Eubacterium eligens Cpf1 (EeCpf1); Moraxella bovoculi 237 Cpf1 (MbCpf1); Prevotella disiens Cpf1 (PdCpf1); or L. bacterium ND2006 Cpf1 (LbCpf1).

[0355] In some embodiments, the modification to the guide is a chemical modification, an insertion, a deletion or a split. In some embodiments, the chemical modification includes, but is not limited to, incorporation of 2′-O-methyl (M) analogs, 2′-deoxy analogs, 2-thiouridine analogs, N6-methyladenosine analogs, 2′-fluoro analogs, 2-aminopurine, 5-bromo-uridine, pseudouridine (E®), N1-methylpseudouridine (melE®), 5-methoxyuridine (5moU), inosine, 7-methylguanosine, 2′-O-methyl-3′-phosphorothioate (MS), S-constrained ethyl(cEt), phosphorothioate (PS), 2′-O-methyl-3′-thioPACE (MSP), or 2′-methyl-3′-phosphonoacetate (MP). In some embodiments, the guide comprises one or more of phosphorothioate modifications. In certain embodiments, at least 1, 2, 3, 4, 5, 6, 7, 8, 9, 10, 11, 12, 13, 14, 15, 16, 17, 18, 19, 20, or 25 nucleotides of the guide are chemically modified. In some embodiments, all nucleotides are chemically modified. In certain embodiments, one or more nucleotides in the seed region are chemically modified. In certain embodiments, one or more nucleotides in the 3′-terminus are chemically modified. In certain embodiments, none of the nucleotides in the 5′-handle is chemically modified. In some embodiments, the chemical modification in the seed region is a minor modification, such as incorporation of a 2′-fluoro analog. In a specific embodiment, one nucleotide of the seed region is replaced with a 2′-fluoro analog. In some embodiments, 5 or 10 nucleotides in the 3′-terminus are chemically modified. Such chemical modifications at the 3′-terminus of the Cpf1 CrRNA improve gene cutting efficiency (see Li, et al., Nature Biomedical Engineering, 2017, 1:0066). In a specific embodiment, 5 nucleotides in the 3′-terminus are replaced with 2′-fluoro analogues. In a specific embodiment, 10 nucleotides in the 3′-terminus are replaced with 2′-fluoro analogues. In a specific embodiment, 5 nucleotides in the 3′-terminus are replaced with 2′-O-methyl (M) analogs. In some embodiments, 3 nucleotides at each of the 3′ and 5′ ends are chemically modified. In a specific embodiment, the modifications comprise 2′-O-methyl or phosphorothioate analogs. In a specific embodiment, 12 nucleotides in the tetraloop and 16 nucleotides in the stem-loop region are replaced with 2′-O-methyl analogs. Such chemical modifications improve in vivo editing and stability (see Finn et al., Cell Reports (2018), 22: 2227-2235).

[0356] In some embodiments, the loop of the 5′-handle of the guide is modified. In some embodiments, the loop of the 5′-handle of the guide is modified to have a deletion, an insertion, a split, or chemical modifications. In certain embodiments, the loop comprises 3, 4, or 5 nucleotides. In certain embodiments, the loop comprises the sequence of UCUU, UUUU, UAUU, or UGUU. In some embodiments, the guide molecule forms a stemloop with a separate non-covalently linked sequence, which can be DNA or RNA.

### Synthetically Linked Guide

[0357] In one aspect, the guide comprises a tracr sequence and a tracr mate sequence that are chemically linked or conjugated via a non-phosphodiester bond. In one aspect, the guide comprises a tracr sequence and a tracr mate sequence that are chemically linked or conjugated via anon-nucleotide loop. In some embodiments, the tracr and tracr mate sequences are joined via a non-phosphodiester covalent linker. Examples of the covalent linker include but are not limited to a chemical moiety selected from the group consisting of carbamates, ethers, esters, amides, imines, amidines, aminotrizines, hydrozone, disulfides, thioethers, thioesters, phosphorothioates, phosphorodithioates, sulfonamides, sulfonates, fulfones, sulfoxides, ureas, thioureas, hydrazide, oxime, triazole, photolabile linkages, C—C bond forming groups such as Diels-Alder cyclo-addition pairs or ring-closing metathesis pairs, and Michael reaction pairs.

[0358] In some embodiments, the tracr and tracr mate sequences are first synthesized using the standard phosphoramidite synthetic protocol (Herdewijn, P., ed., Methods in Molecular Biology Col 288, Oligonucleotide Synthesis: Methods and Applications, Humana Press, New Jersey (2012)). In some embodiments, the tracr or tracr mate sequences can be functionalized to contain an appropriate functional group for ligation using the standard protocol known in the art (Hermanson, G. T., Bioconjugate Techniques, Academic Press (2013)). Examples of functional groups include, but are not limited to, hydroxyl, amine, carboxylic acid, carboxylic acid halide, carboxylic acid active ester, aldehyde, carbonyl, chlorocarbonyl, imidazolylcarbonyl, hydrozide, semicarbazide, thio semicarbazide, thiol, maleimide, haloalkyl, sufonyl, ally, propargyl, diene, alkyne, and azide. Once the tracr and the tracr mate sequences are functionalized, a covalent chemical bond or linkage can be formed between the two oligonucleotides. Examples of chemical bonds include, but are not limited to, those based on carbamates, ethers, esters, amides, imines, amidines, aminotrizines, hydrozone, disulfides, thioethers, thioesters, phosphorothioates, phosphorodithioates, sulfonamides, sulfonates, fulfones, sulfoxides, ureas, thioureas, hydrazide, oxime, triazole, photolabile linkages, C—C bond forming groups such as Diels-Alder cyclo-addition pairs or ring-closing metathesis pairs, and Michael reaction pairs.

[0359] In some embodiments, the tracr and tracr mate sequences can be chemically synthesized. In some embodiments, the chemical synthesis uses automated, solid-phase oligonucleotide synthesis machines with 2′-acetoxyethyl orthoester (2′-ACE) (Scaringe et al., J. Am. Chem. Soc. (1998) 120: 11820-11821; Scaringe, Methods Enzymol. (2000) 317: 3-18) or 2′-thionocarbamate (2′-TC) chemistry (Dellinger et al., J. Am. Chem. Soc. (2011) 133: 11540-11546; Hendel et al., Nat. Biotechnol. (2015) 33:985-989).

[0360] In some embodiments, the tracr and tracr mate sequences can be covalently linked using various bioconjugation reactions, loops, bridges, and non-nucleotide links via modifications of sugar, internucleotide phosphodiester bonds, purine and pyrimidine residues. Sletten et al., Angew. Chem. Int. Ed. (2009) 48:6974-6998; Manoharan, M. Curr. Opin. Chem. Biol. (2004) 8: 570-9; Behlke et al., Oligonucleotides (2008) 18: 305-19; Watts, et al., Drug. Discov. Today (2008) 13: 842-55; Shukla, et al., Chem Med Chem (2010) 5: 328-49.

[0361] In some embodiments, the tracr and tracr mate sequences can be covalently linked using click chemistry. In some embodiments, the tracr and tracr mate sequences can be covalently linked using a triazole linker. In some embodiments, the tracr and tracr mate sequences can be covalently linked using Huisgen 1,3-dipolar cycloaddition reaction involving an alkyne and azide to yield a highly stable triazole linker (He et al., Chem Bio Chem (2015) 17: 1809-1812; WO 2016/186745). In some embodiments, the tracr and tracr mate sequences are covalently linked by ligating a 5′-hexyne tracrRNA and a 3′-azide crRNA. In some embodiments, either or both of the 5′-hexyne tracrRNA and a 3′-azide crRNA can be protected with 2′-acetoxyethl orthoester (2′-ACE) group, which can be subsequently removed using Dharmacon protocol (Scaringe et al., J. Am. Chem. Soc. (1998) 120: 11820-11821; Scaringe, Methods Enzymol. (2000) 317: 3-18).

[0362] In some embodiments, the tracr and tracr mate sequences can be covalently linked via a linker (e.g., a non-nucleotide loop) that comprises a moiety such as spacers, attachments, bioconjugates, chromophores, reporter groups, dye labeled RNAs, and non-naturally occurring nucleotide analogues. More specifically, suitable spacers for purposes of this invention include, but are not limited to, polyethers (e.g., polyethylene glycols, polyalcohols, polypropylene glycol or mixtures of efhylene and propylene glycols), polyamines group (e.g., spennine, spermidine and polymeric derivatives thereof), polyesters (e.g., poly(ethyl acrylate)), polyphosphodiesters, alkylenes, and combinations thereof. Suitable attachments include any moiety that can be added to the linker to add additional properties to the linker, such as but not limited to, fluorescent labels. Suitable bioconjugates include, but are not limited to, peptides, glycosides, lipids, cholesterol, phospholipids, diacyl glycerols and dialkyl glycerols, fatty acids, hydrocarbons, enzyme substrates, steroids, biotin, digoxigenin, carbohydrates, polysaccharides. Suitable chromophores, reporter groups, and dye-labeled RNAs include, but are not limited to, fluorescent dyes such as fluorescein and rhodamine, chemiluminescent, electrochemiluminescent, and bioluminescent marker compounds. The design of example linkers conjugating two RNA components are also described in WO 2004/015075.

[0363] The linker (e.g., a non-nucleotide loop) can be of any length. In some embodiments, the linker has a length equivalent to about 0-16 nucleotides. In some embodiments, the linker has a length equivalent to about 0-8 nucleotides. In some embodiments, the linker has a length equivalent to about 0-4 nucleotides. In some embodiments, the linker has a length equivalent to about 2 nucleotides. Example linker design is also described in WO2011/008730.

[0364] A typical Type II Cas sgRNA comprises (in 5′ to 3′ direction): a guide sequence, a poly U tract, a first complimentary stretch (the “repeat”), a loop (tetraloop), a second complimentary stretch (the “anti-repeat” being complimentary to the repeat), a stem, and further stem loops and stems and a poly A (often poly U in RNA) tail (terminator). In preferred embodiments, certain aspects of guide architecture are retained, certain aspect of guide architecture cam be modified, for example by addition, subtraction, or substitution of features, whereas certain other aspects of guide architecture are maintained. Preferred locations for engineered sgRNA modifications, including but not limited to insertions, deletions, and substitutions include guide termini and regions of the sgRNA that are exposed when complexed with CRISPR protein and/or target, for example the tetraloop and/or loop2.

[0365] In certain embodiments, guides of the invention comprise specific binding sites (e.g. aptamers) for adapter proteins, which may comprise one or more functional domains (e.g. via fusion protein). When such a guide forms a CRISPR complex (i.e. CRISPR enzyme binding to guide and target) the adapter proteins bind and, the functional domain associated with the adapter protein is positioned in a spatial orientation which is advantageous for the attributed function to be effective. For example, if the functional domain is a transcription activator (e.g. VP64 or p65), the transcription activator is placed in a spatial orientation which allows it to affect the transcription of the target. Likewise, a transcription repressor will be advantageously positioned to affect the transcription of the target and a nuclease (e.g. Fok1) will be advantageously positioned to cleave or partially cleave the target.

[0366] The skilled person will understand that modifications to the guide which allow for binding of the adapter+functional domain but not proper positioning of the adapter+functional domain (e.g. due to steric hindrance within the three dimensional structure of the CRISPR complex) are modifications which are not intended. The one or more modified guide may be modified at the tetra loop, the stem loop 1, stem loop 2, or stem loop 3, as described herein, preferably at either the tetra loop or stem loop 2, and most preferably at both the tetra loop and stem loop 2.

[0367] The repeat:anti repeat duplex will be apparent from the secondary structure of the sgRNA. It may be typically a first complimentary stretch after (in 5′ to 3′ direction) the poly U tract and before the tetraloop; and a second complimentary stretch after (in 5′ to 3′ direction) the tetraloop and before the poly A tract. The first complimentary stretch (the “repeat”) is complimentary to the second complimentary stretch (the “anti-repeat”). As such, they Watson-Crick base pair to form a duplex of dsRNA when folded back on one another. As such, the anti-repeat sequence is the complimentary sequence of the repeat and in terms to A-U or C-G base pairing, but also in terms of the fact that the anti-repeat is in the reverse orientation due to the tetraloop.

[0368] In an embodiment of the invention, modification of guide architecture comprises replacing bases in stemloop 2. For example, in some embodiments, “actt” (“acuu” in RNA) and “aagt” (“aagu” in RNA) bases in stemloop2 are replaced with “cgcc” and “gcgg”. In some embodiments, “actt” and “aagt” bases in stemloop2 are replaced with complimentary GC-rich regions of 4 nucleotides. In some embodiments, the complimentary GC-rich regions of 4 nucleotides are “cgcc” and “gcgg” (both in 5′ to 3′ direction). In some embodiments, the complimentary GC-rich regions of 4 nucleotides are “gcgg” and “cgcc” (both in 5′ to 3′ direction). Other combination of C and G in the complimentary GC-rich regions of 4 nucleotides will be apparent including CCCC and GGGG.

[0369] In one aspect, the stemloop 2, e.g., “ACTTgtttAAGT” can be replaced by any “XXXXgtttYYYY”, e.g., where XXXX and YYYY represent any complementary sets of nucleotides that together will base pair to each other to create a stem.

[0370] In one aspect, the stem comprises at least about 4 bp comprising complementary X and Y sequences, although stems of more, e.g., 5, 6, 7, 8, 9, 10, 11 or 12 or fewer, e.g., 3, 2, base pairs are also contemplated. Thus, for example X2-12 and Y2-12 (wherein X and Y represent any complementary set of nucleotides) may be contemplated. In one aspect, the stem made of the X and Y nucleotides, together with the “gttt,” will form a complete hairpin in the overall secondary structure; and, this may be advantageous and the amount of base pairs can be any amount that forms a complete hairpin. In one aspect, any complementary X:Y basepairing sequence (e.g., as to length) is tolerated, so long as the secondary structure of the entire sgRNA is preserved. In one aspect, the stem can be a form of X:Y basepairing that does not disrupt the secondary structure of the whole sgRNA in that it has a DR:tracr duplex, and 3 stemloops. In one aspect, the “gttt” tetraloop that connects ACTT and AAGT (or any alternative stem made of X:Y basepairs) can be any sequence of the same length (e.g., 4 basepair) or longer that does not interrupt the overall secondary structure of the sgRNA. In one aspect, the stemloop can be something that further lengthens stemloop2, e.g. can be MS2 aptamer. In one aspect, the stemloop3 “GGCACCGagtCGGTGC” can likewise take on a “XXXXXXXagtYYYYYYY” form, e.g., wherein X7 and Y7 represent any complementary sets of nucleotides that together will base pair to each other to create a stem. In one aspect, the stem comprises about 7 bp comprising complementary X and Y sequences, although stems of more or fewer basepairs are also contemplated. In one aspect, the stem made of the X and Y nucleotides, together with the “agt”, will form a complete hairpin in the overall secondary structure. In one aspect, any complementary X:Y basepairing sequence is tolerated, so long as the secondary structure of the entire sgRNA is preserved. In one aspect, the stem can be a form of X:Y basepairing that doesn't disrupt the secondary structure of the whole sgRNA in that it has a DR:tracr duplex, and 3 stemloops. In one aspect, the “agt” sequence of the stemloop 3 can be extended or be replaced by an aptamer, e.g., a MS2 aptamer or sequence that otherwise generally preserves the architecture of stemloop3. In one aspect for alternative Stemloops 2 and/or 3, each X and Y pair can refer to any basepair. In one aspect, non-Watson Crick basepairing is contemplated, where such pairing otherwise generally preserves the architecture of the stemloop at that position.

[0371] In one aspect, the DR:tracrRNA duplex can be replaced with the form: gYYYYag(N)NNNNxxxxNNNN(AAN)uuRRRRu (using standard IUPAC nomenclature for nucleotides), wherein (N) and (AAN) represent part of the bulge in the duplex, and “xxxx” represents a linker sequence. NNNN on the direct repeat can be anything so long as it basepairs with the corresponding NNNN portion of the tracrRNA. In one aspect, the DR:tracrRNA duplex can be connected by a linker of any length (xxxx . . . ), any base composition, as long as it doesn't alter the overall structure.

[0372] In one aspect, the sgRNA structural requirement is to have a duplex and 3 stemloops. In most aspects, the actual sequence requirement for many of the particular base requirements are lax, in that the architecture of the DR:tracrRNA duplex should be preserved, but the sequence that creates the architecture, i.e., the stems, loops, bulges, etc., may be alterred. Aptamers

[0373] One guide with a first aptamer/RNA-binding protein pair can be linked or fused to an activator, whilst a second guide with a second aptamer/RNA-binding protein pair can be linked or fused to a repressor. The guides are for different targets (loci), so this allows one gene to be activated and one repressed. For example, the following schematic shows such an approach:

[0374] Guide 1—MS2 aptamer-------MS2 RNA-binding protein-------VP64 activator; and

[0375] Guide 2—PP7 aptamer-------PP7 RNA-binding protein-------SID4x repressor.

[0376] The present invention also relates to orthogonal PP7/MS2 gene targeting. In this example, sgRNA targeting different loci are modified with distinct RNA loops in order to recruit MS2-VP64 or PP7-SID4X, which activate and repress their target loci, respectively. PP7 is the RNA-binding coat protein of the bacteriophage Pseudomonas. Like MS2, it binds a specific RNA sequence and secondary structure. The PP7 RNA-recognition motif is distinct from that of MS2. Consequently, PP7 and MS2 can be multiplexed to mediate distinct effects at different genomic loci simultaneously. For example, an sgRNA targeting locus A can be modified with MS2 loops, recruiting MS2-VP64 activators, while another sgRNA targeting locus B can be modified with PP7 loops, recruiting PP7-SID4X repressor domains. In the same cell, dCas13 can thus mediate orthogonal, locus-specific modifications. This principle can be extended to incorporate other orthogonal RNA-binding proteins such as Q-beta.

[0377] An alternative option for orthogonal repression includes incorporating non-coding RNA loops with transactive repressive function into the guide (either at similar positions to the MS2/PP7 loops integrated into the guide or at the 3′ terminus of the guide). For instance, guides were designed with non-coding (but known to be repressive) RNA loops (e.g. using the Alu repressor (in RNA) that interferes with RNA polymerase II in mammalian cells). The Alu RNA sequence was located: in place of the MS2 RNA sequences as used herein (e.g. at tetraloop and/or stem loop 2); and/or at 3′ terminus of the guide. This gives possible combinations of MS2, PP7 or Alu at the tetraloop and/or stemloop 2 positions, as well as, optionally, addition of Alu at the 3′ end of the guide (with or without a linker).

[0378] The use of two different aptamers (distinct RNA) allows an activator-adaptor protein fusion and a repressor-adaptor protein fusion to be used, with different guides, to activate expression of one gene, whilst repressing another. They, along with their different guides can be administered together, or substantially together, in a multiplexed approach. A large number of such modified guides can be used all at the same time, for example 10 or 20 or 30 and so forth, whilst only one (or at least a minimal number) of Cas13s to be delivered, as a comparatively small number of Cas13s can be used with a large number modified guides. The adaptor protein may be associated (preferably linked or fused to) one or more activators or one or more repressors. For example, the adaptor protein may be associated with a first activator and a second activator. The first and second activators may be the same, but they are preferably different activators. For example, one might be VP64, whilst the other might be p65, although these are just examples and other transcriptional activators are envisaged. Three or more or even four or more activators (or repressors) may be used, but package size may limit the number being higher than 5 different functional domains. Linkers are preferably used, over a direct fusion to the adaptor protein, where two or more functional domains are associated with the adaptor protein. Suitable linkers might include the GlySer linker.

[0379] It is also envisaged that the enzyme-guide complex as a whole may be associated with two or more functional domains. For example, there may be two or more functional domains associated with the enzyme, or there may be two or more functional domains associated with the guide (via one or more adaptor proteins), or there may be one or more functional domains associated with the enzyme and one or more functional domains associated with the guide (via one or more adaptor proteins).

[0380] The fusion between the adaptor protein and the activator or repressor may include a linker. For example, GlySer linkers GGGS can be used. They can be used in repeats of 3 ((GGGGS)3) or 6, 9 or even 12 or more, to provide suitable lengths, as required. Linkers can be used between the RNA-binding protein and the functional domain (activator or repressor), or between the CRISPR Enzyme (Cas13) and the functional domain (activator or repressor). The linkers the user to engineer appropriate amounts of “mechanical flexibility”.

[0381] Dead Guides: Guide RNAs Comprising a Dead Guide Sequence May be Used in the Present Invention

[0382] In one aspect, the invention provides guide sequences which are modified in a manner which allows for formation of the CRISPR complex and successful binding to the target, while at the same time, not allowing for successful nuclease activity (i.e. without nuclease activity/without indel activity). For matters of explanation such modified guide sequences are referred to as “dead guides” or “dead guide sequences”. These dead guides or dead guide sequences can be thought of as catalytically inactive or conformationally inactive with regard to nuclease activity. Nuclease activity may be measured using surveyor analysis or deep sequencing as commonly used in the art, preferably surveyor analysis. Similarly, dead guide sequences may not sufficiently engage in productive base pairing with respect to the ability to promote catalytic activity or to distinguish on-target and off-target binding activity. Briefly, the surveyor assay involves purifying and amplifying a CRISPR target site for a gene and forming heteroduplexes with primers amplifying the CRISPR target site. After re-anneal, the products are treated with SURVEYOR nuclease and SURVEYOR enhancer S (Transgenomics) following the manufacturer's recommended protocols, analyzed on gels, and quantified based upon relative band intensities.

[0383] Hence, in a related aspect, the invention provides a non-naturally occurring or engineered composition Cas13 CRISPR-Cas system comprising a functional Cas13 as described herein, and guide RNA (gRNA) wherein the gRNA comprises a dead guide sequence whereby the gRNA is capable of hybridizing to a target sequence such that the Cas13 CRISPR-Cas system is directed to a genomic locus of interest in a cell without detectable indel activity resultant from nuclease activity of a non-mutant Cas13 enzyme of the system as detected by a SURVEYOR assay. For shorthand purposes, a gRNA comprising a dead guide sequence whereby the gRNA is capable of hybridizing to a target sequence such that the Cas13 CRISPR-Cas system is directed to a genomic locus of interest in a cell without detectable indel activity resultant from nuclease activity of a non-mutant Cas13 enzyme of the system as detected by a SURVEYOR assay is herein termed a “dead gRNA”. It is to be understood that any of the gRNAs according to the invention as described herein elsewhere may be used as dead gRNAs/gRNAs comprising a dead guide sequence as described herein below. Any of the methods, products, compositions and uses as described herein elsewhere is equally applicable with the dead gRNAs/gRNAs comprising a dead guide sequence as further detailed below. By means of further guidance, the following particular aspects and embodiments are provided.

[0384] The ability of a dead guide sequence to direct sequence-specific binding of a CRISPR complex to a target sequence may be assessed by any suitable assay. For example, the components of a CRISPR system sufficient to form a CRISPR complex, including the dead guide sequence to be tested, may be provided to a host cell having the corresponding target sequence, such as by transfection with vectors encoding the components of the CRISPR sequence, followed by an assessment of preferential cleavage within the target sequence, such as by Surveyor assay as described herein. Similarly, cleavage of a target polynucleotide sequence may be evaluated in a test tube by providing the target sequence, components of a CRISPR complex, including the dead guide sequence to be tested and a control guide sequence different from the test dead guide sequence, and comparing binding or rate of cleavage at the target sequence between the test and control guide sequence reactions. Other assays are possible, and will occur to those skilled in the art. A dead guide sequence may be selected to target any target sequence. In some embodiments, the target sequence is a sequence within a genome of a cell.

[0385] As explained further herein, several structural parameters allow for a proper framework to arrive at such dead guides. Dead guide sequences are shorter than respective guide sequences which result in active Cas13-specific indel formation. Dead guides are 5%, 10%, 20%, 30%, 40%, 50%, shorter than respective guides directed to the same Cas13 leading to active Cas13-specific indel formation.

[0386] As explained below and known in the art, one aspect of gRNA-Cas specificity is the direct repeat sequence, which is to be appropriately linked to such guides. In particular, this implies that the direct repeat sequences are designed dependent on the origin of the Cas. Thus, structural data available for validated dead guide sequences may be used for designing Cas specific equivalents. Structural similarity between, e.g., the orthologous nuclease domains RuvC of two or more Cas effector proteins may be used to transfer design equivalent dead guides. Thus, the dead guide herein may be appropriately modified in length and sequence to reflect such Cas specific equivalents, allowing for formation of the CRISPR complex and successful binding to the target, while at the same time, not allowing for successful nuclease activity.

[0387] The use of dead guides in the context herein as well as the state of the art provides a surprising and unexpected platform for network biology and/or systems biology in both in vitro, ex vivo, and in vivo applications, allowing for multiplex gene targeting, and in particular bidirectional multiplex gene targeting. Prior to the use of dead guides, addressing multiple targets, for example for activation, repression and/or silencing of gene activity, has been challenging and in some cases not possible. With the use of dead guides, multiple targets, and thus multiple activities, may be addressed, for example, in the same cell, in the same animal, or in the same patient. Such multiplexing may occur at the same time or staggered for a desired timeframe.

[0388] For example, the dead guides now allow for the first time to use gRNA as a means for gene targeting, without the consequence of nuclease activity, while at the same time providing directed means for activation or repression. Guide RNA comprising a dead guide may be modified to further include elements in a manner which allow for activation or repression of gene activity, in particular protein adaptors (e.g. aptamers) as described herein elsewhere allowing for functional placement of gene effectors (e.g. activators or repressors of gene activity). One example is the incorporation of aptamers, as explained herein and in the state of the art. By engineering the gRNA comprising a dead guide to incorporate protein-interacting aptamers (Konermann et al., “Genome-scale transcription activation by an engineered CRISPR-Cas9 complex,” doi:10.1038/nature14136, incorporated herein by reference), one may assemble a synthetic transcription activation complex consisting of multiple distinct effector domains. Such may be modeled after natural transcription activation processes. For example, an aptamer, which selectively binds an effector (e.g. an activator or repressor; dimerized MS2 bacteriophage coat proteins as fusion proteins with an activator or repressor), or a protein which itself binds an effector (e.g. activator or repressor) may be appended to a dead gRNA tetraloop and/or a stem-loop 2. In the case of MS2, the fusion protein MS2-VP64 binds to the tetraloop and/or stem-loop 2 and in turn mediates transcriptional up-regulation, for example for Neurog2. Other transcriptional activators are, for example, VP64. P65, HSF1, and MyoD1. By mere example of this concept, replacement of the MS2 stem-loops with PP7-interacting stem-loops may be used to recruit repressive elements.

[0389] Thus, one aspect is a gRNA of the invention which comprises a dead guide, wherein the gRNA further comprises modifications which provide for gene activation or repression, as described herein. The dead gRNA may comprise one or more aptamers. The aptamers may be specific to gene effectors, gene activators or gene repressors. Alternatively, the aptamers may be specific to a protein which in turn is specific to and recruits/binds a specific gene effector, gene activator or gene repressor. If there are multiple sites for activator or repressor recruitment, it is preferred that the sites are specific to either activators or repressors. If there are multiple sites for activator or repressor binding, the sites may be specific to the same activators or same repressors. The sites may also be specific to different activators or different repressors. The gene effectors, gene activators, gene repressors may be present in the form of fusion proteins.

[0390] In an embodiment, the dead gRNA as described herein or the Cas13 CRISPR-Cas complex as described herein includes a non-naturally occurring or engineered composition comprising two or more adaptor proteins, wherein each protein is associated with one or more functional domains and wherein the adaptor protein binds to the distinct RNA sequence(s) inserted into the at least one loop of the dead gRNA.

[0391] Hence, an aspect provides a non-naturally occurring or engineered composition comprising a guide RNA (gRNA) comprising a dead guide sequence capable of hybridizing to a target sequence in a genomic locus of interest in a cell, wherein the dead guide sequence is as defined herein, a Cas13 comprising at least one or more nuclear localization sequences, wherein the Cas13 optionally comprises at least one mutation wherein at least one loop of the dead gRNA is modified by the insertion of distinct RNA sequence(s) that bind to one or more adaptor proteins, and wherein the adaptor protein is associated with one or more functional domains; or, wherein the dead gRNA is modified to have at least one non-coding functional loop, and wherein the composition comprises two or more adaptor proteins, wherein the each protein is associated with one or more functional domains.

[0392] In certain embodiments, the adaptor protein is a fusion protein comprising the functional domain, the fusion protein optionally comprising a linker between the adaptor protein and the functional domain, the linker optionally including a GlySer linker.

[0393] In certain embodiments, the at least one loop of the dead gRNA is not modified by the insertion of distinct RNA sequence(s) that bind to the two or more adaptor proteins.

[0394] In certain embodiments, the one or more functional domains associated with the adaptor protein is a transcriptional activation domain.

[0395] In certain embodiments, the one or more functional domains associated with the adaptor protein is a transcriptional activation domain comprising VP64, p65, MyoD1, HSF1, RTA or SET7/9.

[0396] In certain embodiments, the one or more functional domains associated with the adaptor protein is a transcriptional repressor domain.

[0397] In certain embodiments, the transcriptional repressor domain is a KRAB domain.

[0398] In certain embodiments, the transcriptional repressor domain is a NuE domain, NcoR domain, SID domain or a SID4X domain.

[0399] In certain embodiments, at least one of the one or more functional domains associated with the adaptor protein have one or more activities comprising methylase activity, demethylase activity, transcription activation activity, transcription repression activity, transcription release factor activity, histone modification activity, DNA integration activity RNA cleavage activity, DNA cleavage activity or nucleic acid binding activity.

[0400] In certain embodiments, the DNA cleavage activity is due to a Fok1 nuclease.

[0401] In certain embodiments, the dead gRNA is modified so that, after dead gRNA binds the adaptor protein and further binds to the Cas13 and target, the functional domain is in a spatial orientation allowing for the functional domain to function in its attributed function.

[0402] In certain embodiments, the at least one loop of the dead gRNA is tetra loop and/or loop2. In certain embodiments, the tetra loop and loop 2 of the dead gRNA are modified by the insertion of the distinct RNA sequence(s).

[0403] In certain embodiments, the insertion of distinct RNA sequence(s) that bind to one or more adaptor proteins is an aptamer sequence. In certain embodiments, the aptamer sequence is two or more aptamer sequences specific to the same adaptor protein. In certain embodiments, the aptamer sequence is two or more aptamer sequences specific to different adaptor protein.

[0404] In certain embodiments, the adaptor protein comprises MS2, PP7, Qβ, F2, GA, fr, JP501, M12, R17, BZ13, JP34, JP500, KU1, M11, MX1, TW18, VK, SP, FI, ID2, NL95, TW19, AP205, ϕCb5, ϕCb8r, ϕCb12r, ϕCb23r, 7s, PRR1.

[0405] In certain embodiments, the cell is a eukaryotic cell. In certain embodiments, the eukaryotic cell is a mammalian cell, optionally a mouse cell. In certain embodiments, the mammalian cell is a human cell.

[0406] In certain embodiments, a first adaptor protein is associated with a p65 domain and a second adaptor protein is associated with a HSF1 domain.

[0407] In certain embodiments, the composition comprises a Cas13 CRISPR-Cas complex having at least three functional domains, at least one of which is associated with the Cas13 and at least two of which are associated with dead gRNA.

[0408] In certain embodiments, the composition further comprises a second gRNA, wherein the second gRNA is a live gRNA capable of hybridizing to a second target sequence such that a second Cas13 CRISPR-Cas system is directed to a second genomic locus of interest in a cell with detectable indel activity at the second genomic locus resultant from nuclease activity of the Cas13 enzyme of the system.

[0409] In certain embodiments, the composition further comprises a plurality of dead gRNAs and/or a plurality of live gRNAs.

[0410] One aspect of the invention is to take advantage of the modularity and customizability of the gRNA scaffold to establish a series of gRNA scaffolds with different binding sites (in particular aptamers) for recruiting distinct types of effectors in an orthogonal manner. Again, for matters of example and illustration of the broader concept, replacement of the MS2 stem-loops with PP7-interacting stem-loops may be used to bind/recruit repressive elements, enabling multiplexed bidirectional transcriptional control. Thus, in general, gRNA comprising a dead guide may be employed to provide for multiplex transcriptional control and preferred bidirectional transcriptional control. This transcriptional control is most preferred of genes. For example, one or more gRNA comprising dead guide(s) may be employed in targeting the activation of one or more target genes. At the same time, one or more gRNA comprising dead guide(s) may be employed in targeting the repression of one or more target genes. Such a sequence may be applied in a variety of different combinations, for example the target genes are first repressed and then at an appropriate period other targets are activated, or select genes are repressed at the same time as select genes are activated, followed by further activation and/or repression. As a result, multiple components of one or more biological systems may advantageously be addressed together.

[0411] In an aspect, the invention provides nucleic acid molecule(s) encoding dead gRNA or the Cas13 CRISPR-Cas complex or the composition as described herein.

[0412] In an aspect, the invention provides a vector system comprising: a nucleic acid molecule encoding dead guide RNA as defined herein. In certain embodiments, the vector system further comprises a nucleic acid molecule(s) encoding Cas13. In certain embodiments, the vector system further comprises a nucleic acid molecule(s) encoding (live) gRNA. In certain embodiments, the nucleic acid molecule or the vector further comprises regulatory element(s) operable in a eukaryotic cell operably linked to the nucleic acid molecule encoding the guide sequence (gRNA) and/or the nucleic acid molecule encoding Cas13 and/or the optional nuclear localization sequence(s).

[0413] In another aspect, structural analysis may also be used to study interactions between the dead guide and the active Cas nuclease that enable DNA binding, but no DNA cutting. In this way amino acids important for nuclease activity of Cas are determined. Modification of such amino acids allows for improved Cas enzymes used for gene editing.

[0414] A further aspect is combining the use of dead guides as explained herein with other applications of CRISPR, as explained herein as well as known in the art. For example, gRNA comprising dead guide(s) for targeted multiplex gene activation or repression or targeted multiplex bidirectional gene activation/repression may be combined with gRNA comprising guides which maintain nuclease activity, as explained herein. Such gRNA comprising guides which maintain nuclease activity may or may not further include modifications which allow for repression of gene activity (e.g. aptamers). Such gRNA comprising guides which maintain nuclease activity may or may not further include modifications which allow for activation of gene activity (e.g. aptamers). In such a manner, a further means for multiplex gene control is introduced (e.g. multiplex gene targeted activation without nuclease activity/without indel activity may be provided at the same time or in combination with gene targeted repression with nuclease activity).

[0415] For example, 1) using one or more gRNA (e.g. 1-50, 1-40, 1-30, 1-20, preferably 1-10, more preferably 1-5) comprising dead guide(s) targeted to one or more genes and further modified with appropriate aptamers for the recruitment of gene activators; 2) may be combined with one or more gRNA (e.g. 1-50, 1-40, 1-30, 1-20, preferably 1-10, more preferably 1-5) comprising dead guide(s) targeted to one or more genes and further modified with appropriate aptamers for the recruitment of gene repressors. 1) and/or 2) may then be combined with 3) one or more gRNA (e.g. 1-50, 1-40, 1-30, 1-20, preferably 1-10, more preferably 1-5) targeted to one or more genes. This combination can then be carried out in turn with 1)+2)+3) with 4) one or more gRNA (e.g. 1-50, 1-40, 1-30, 1-20, preferably 1-10, more preferably 1-5) targeted to one or more genes and further modified with appropriate aptamers for the recruitment of gene activators. This combination can then be carried in turn with 1z)+2)+3)+4) with 5) one or more gRNA (e.g. 1-50, 1-40, 1-30, 1-20, preferably 1-10, more preferably 1-5) targeted to one or more genes and further modified with appropriate aptamers for the recruitment of gene repressors. As a result various uses and combinations are included in the invention. For example, combination 1)+2); combination 1)+3); combination 2)+3); combination 1)+2)+3); combination 1)+2)+3)+4); combination 1)+3)+4); combination 2)+3)+4); combination 1)+2)+4); combination 1)+2)+3)+4)+5); combination 1)+3)+4)+5); combination 2)+3)+4)+5); combination 1)+2)+4)+5); combination 1)+2)+3)+5); combination 1)+3)+5); combination 2)+3)+5); combination 1)+2)+5).

[0416] In an aspect, the invention provides an algorithm for designing, evaluating, or selecting a dead guide RNA targeting sequence (dead guide sequence) for guiding a Cas13 CRISPR-Cas system to a target gene locus. In particular, it has been determined that dead guide RNA specificity relates to and can be optimized by varying i) GC content and ii) targeting sequence length. In an aspect, the invention provides an algorithm for designing or evaluating a dead guide RNA targeting sequence that minimizes off-target binding or interaction of the dead guide RNA. In an embodiment of the invention, the algorithm for selecting a dead guide RNA targeting sequence for directing a CRISPR system to a gene locus in an organism comprises a) locating one or more CRISPR motifs in the gene locus, analyzing the 20 nt sequence downstream of each CRISPR motif by i) determining the GC content of the sequence; and ii) determining whether there are off-target matches of the 15 downstream nucleotides nearest to the CRISPR motif in the genome of the organism, and c) selecting the 15 nucleotide sequence for use in a dead guide RNA if the GC content of the sequence is 70% or less and no off-target matches are identified. In an embodiment, the sequence is selected for a targeting sequence if the GC content is 60% or less. In certain embodiments, the sequence is selected for a targeting sequence if the GC content is 55% or less, 50% or less, 45% or less, 40% or less, 35% or less or 30% or less. In an embodiment, two or more sequences of the gene locus are analyzed and the sequence having the lowest GC content, or the next lowest GC content, or the next lowest GC content is selected. In an embodiment, the sequence is selected for a targeting sequence if no off-target matches are identified in the genome of the organism. In an embodiment, the targeting sequence is selected if no off-target matches are identified in regulatory sequences of the genome.

[0417] In an aspect, the invention provides a method of selecting a dead guide RNA targeting sequence for directing a functionalized CRISPR system to a gene locus in an organism, which comprises: a) locating one or more CRISPR motifs in the gene locus; b) analyzing the 20 nt sequence downstream of each CRISPR motif by: i) determining the GC content of the sequence; and ii) determining whether there are off-target matches of the first 15 nt of the sequence in the genome of the organism; c) selecting the sequence for use in a guide RNA if the GC content of the sequence is 70% or less and no off-target matches are identified. In an embodiment, the sequence is selected if the GC content is 50% or less. In an embodiment, the sequence is selected if the GC content is 40% or less. In an embodiment, the sequence is selected if the GC content is 30% or less. In an embodiment, two or more sequences are analyzed and the sequence having the lowest GC content is selected. In an embodiment, off-target matches are determined in regulatory sequences of the organism. In an embodiment, the gene locus is a regulatory region. An aspect provides a dead guide RNA comprising the targeting sequence selected according to the aforementioned methods.

[0418] In an aspect, the invention provides a dead guide RNA for targeting a functionalized CRISPR system to a gene locus in an organism. In an embodiment of the invention, the dead guide RNA comprises a targeting sequence wherein the CG content of the target sequence is 70% or less, and the first 15 nt of the targeting sequence does not match an off-target sequence downstream from a CRISPR motif in the regulatory sequence of another gene locus in the organism. In certain embodiments, the GC content of the targeting sequence 60% or less, 55% or less, 50% or less, 45% or less, 40% or less, 35% or less or 30% or less. In certain embodiments, the GC content of the targeting sequence is from 70% to 60% or from 60% to 50% or from 50% to 40% or from 40% to 30%. In an embodiment, the targeting sequence has the lowest CG content among potential targeting sequences of the locus.

[0419] In an embodiment of the invention, the first 15 nt of the dead guide match the target sequence. In another embodiment, first 14 nt of the dead guide match the target sequence. In another embodiment, the first 13 nt of the dead guide match the target sequence. In another embodiment first 12 nt of the dead guide match the target sequence. In another embodiment, first 11 nt of the dead guide match the target sequence. In another embodiment, the first 10 nt of the dead guide match the target sequence. In an embodiment of the invention the first 15 nt of the dead guide does not match an off-target sequence downstream from a CRISPR motif in the regulatory region of another gene locus. In other embodiments, the first 14 nt, or the first 13 nt of the dead guide, or the first 12 nt of the guide, or the first 11 nt of the dead guide, or the first 10 nt of the dead guide, does not match an off-target sequence downstream from a CRISPR motif in the regulatory region of another gene locus. In other embodiments, the first 15 nt, or 14 nt, or 13 nt, or 12 nt, or 11 nt of the dead guide do not match an off-target sequence downstream from a CRISPR motif in the genome.

[0420] In certain embodiments, the dead guide RNA includes additional nucleotides at the 3′-end that do not match the target sequence. Thus, a dead guide RNA that includes the first 15 nt, or 14 nt, or 13 nt, or 12 nt, or 11 nt downstream of a CRISPR motif can be extended in length at the 3′ end to 12 nt, 13 nt, 14 nt, 15 nt, 16 nt, 17 nt, 18 nt, 19 nt, 20 nt, or longer.

[0421] The invention provides a method for directing a Cas13 CRISPR-Cas system, including but not limited to a dead Cas13 (dCas13) or functionalized Cas13 system (which may comprise a functionalized Cas13 or functionalized guide) to a gene locus. In an aspect, the invention provides a method for selecting a dead guide RNA targeting sequence and directing a functionalized CRISPR system to a gene locus in an organism. In an aspect, the invention provides a method for selecting a dead guide RNA targeting sequence and effecting gene regulation of a target gene locus by a functionalized Cas13 CRISPR-Cas system. In certain embodiments, the method is used to effect target gene regulation while minimizing off-target effects. In an aspect, the invention provides a method for selecting two or more dead guide RNA targeting sequences and effecting gene regulation of two or more target gene loci by a functionalized Cas13 CRISPR-Cas system. In certain embodiments, the method is used to effect regulation of two or more target gene loci while minimizing off-target effects.

[0422] In an aspect, the invention provides a method of selecting a dead guide RNA targeting sequence for directing a functionalized Cas13 to a gene locus in an organism, which comprises: a) locating one or more CRISPR motifs in the gene locus; b) analyzing the sequence downstream of each CRISPR motif by: i) selecting 10 to 15 nt adjacent to the CRISPR motif, ii) determining the GC content of the sequence; and c) selecting the 10 to 15 nt sequence as a targeting sequence for use in a guide RNA if the GC content of the sequence is 40% or more. In an embodiment, the sequence is selected if the GC content is 50% or more. In an embodiment, the sequence is selected if the GC content is 60% or more. In an embodiment, the sequence is selected if the GC content is 70% or more. In an embodiment, two or more sequences are analyzed and the sequence having the highest GC content is selected. In an embodiment, the method further comprises adding nucleotides to the 3′ end of the selected sequence which do not match the sequence downstream of the CRISPR motif. An aspect provides a dead guide RNA comprising the targeting sequence selected according to the aforementioned methods.

[0423] In an aspect, the invention provides a dead guide RNA for directing a functionalized CRISPR system to a gene locus in an organism wherein the targeting sequence of the dead guide RNA consists of 10 to 15 nucleotides adjacent to the CRISPR motif of the gene locus, wherein the CG content of the target sequence is 50% or more. In certain embodiments, the dead guide RNA further comprises nucleotides added to the 3′ end of the targeting sequence which do not match the sequence downstream of the CRISPR motif of the gene locus.

[0424] In an aspect, the invention provides for a single effector to be directed to one or more, or two or more gene loci. In certain embodiments, the effector is associated with a Cas13, and one or more, or two or more selected dead guide RNAs are used to direct the Cas13-associated effector to one or more, or two or more selected target gene loci. In certain embodiments, the effector is associated with one or more, or two or more selected dead guide RNAs, each selected dead guide RNA, when complexed with a Cas13 enzyme, causing its associated effector to localize to the dead guide RNA target. One non-limiting example of such CRISPR systems modulates activity of one or more, or two or more gene loci subject to regulation by the same transcription factor.

[0425] In an aspect, the invention provides for two or more effectors to be directed to one or more gene loci. In certain embodiments, two or more dead guide RNAs are employed, each of the two or more effectors being associated with a selected dead guide RNA, with each of the two or more effectors being localized to the selected target of its dead guide RNA. One non-limiting example of such CRISPR systems modulates activity of one or more, or two or more gene loci subject to regulation by different transcription factors. Thus, in one non-limiting embodiment, two or more transcription factors are localized to different regulatory sequences of a single gene. In another non-limiting embodiment, two or more transcription factors are localized to different regulatory sequences of different genes. In certain embodiments, one transcription factor is an activator. In certain embodiments, one transcription factor is an inhibitor. In certain embodiments, one transcription factor is an activator and another transcription factor is an inhibitor. In certain embodiments, gene loci expressing different components of the same regulatory pathway are regulated. In certain embodiments, gene loci expressing components of different regulatory pathways are regulated.

[0426] In an aspect, the invention also provides a method and algorithm for designing and selecting dead guide RNAs that are specific for target DNA cleavage or target binding and gene regulation mediated by an active Cas13 CRISPR-Cas system. In certain embodiments, the Cas13 CRISPR-Cas system provides orthogonal gene control using an active Cas13 which cleaves target DNA at one gene locus while at the same time binds to and promotes regulation of another gene locus.

[0427] In an aspect, the invention provides an method of selecting a dead guide RNA targeting sequence for directing a functionalized Cas13 to a gene locus in an organism, without cleavage, which comprises a) locating one or more CRISPR motifs in the gene locus; b) analyzing the sequence downstream of each CRISPR motif by i) selecting 10 to 15 nt adjacent to the CRISPR motif, ii) determining the GC content of the sequence, and c) selecting the 10 to 15 nt sequence as a targeting sequence for use in a dead guide RNA if the GC content of the sequence is 30% more, 40% or more. In certain embodiments, the GC content of the targeting sequence is 35% or more, 40% or more, 45% or more, 50% or more, 55% or more, 60% or more, 65% or more, or 70% or more. In certain embodiments, the GC content of the targeting sequence is from 30% to 40% or from 40% to 50% or from 50% to 60% or from 60% to 70%. In an embodiment of the invention, two or more sequences in a gene locus are analyzed and the sequence having the highest GC content is selected.

[0428] In an embodiment of the invention, the portion of the targeting sequence in which GC content is evaluated is 10 to 15 contiguous nucleotides of the 15 target nucleotides nearest to the PAM. In an embodiment of the invention, the portion of the guide in which GC content is considered is the 10 to 11 nucleotides or 11 to 12 nucleotides or 12 to 13 nucleotides or 13, or 14, or 15 contiguous nucleotides of the 15 nucleotides nearest to the PAM.

[0429] In an aspect, the invention further provides an algorithm for identifying dead guide RNAs which promote CRISPR system gene locus cleavage while avoiding functional activation or inhibition. It is observed that increased GC content in dead guide RNAs of 16 to 20 nucleotides coincides with increased DNA cleavage and reduced functional activation.

[0430] It is also demonstrated herein that efficiency of functionalized Cas13 can be increased by addition of nucleotides to the 3′ end of a guide RNA which do not match a target sequence downstream of the CRISPR motif. For example, of dead guide RNA 11 to 15 nt in length, shorter guides may be less likely to promote target cleavage, but are also less efficient at promoting CRISPR system binding and functional control. In certain embodiments, addition of nucleotides that don't match the target sequence to the 3′ end of the dead guide RNA increase activation efficiency while not increasing undesired target cleavage. In an aspect, the invention also provides a method and algorithm for identifying improved dead guide RNAs that effectively promote CRISPRP system function in DNA binding and gene regulation while not promoting DNA cleavage. Thus, in certain embodiments, the invention provides a dead guide RNA that includes the first 15 nt, or 14 nt, or 13 nt, or 12 nt, or 11 nt downstream of a CRISPR motif and is extended in length at the 3′ end by nucleotides that mismatch the target to 12 nt, 13 nt, 14 nt, 15 nt, 16 nt, 17 nt, 18 nt, 19 nt, 20 nt, or longer.

[0431] In an aspect, the invention provides a method for effecting selective orthogonal gene control. As will be appreciated from the disclosure herein, dead guide selection according to the invention, taking into account guide length and GC content, provides effective and selective transcription control by a functional Cas13 CRISPR-Cas system, for example to regulate transcription of a gene locus by activation or inhibition and minimize off-target effects. Accordingly, by providing effective regulation of individual target loci, the invention also provides effective orthogonal regulation of two or more target loci.

[0432] In certain embodiments, orthogonal gene control is by activation or inhibition of two or more target loci. In certain embodiments, orthogonal gene control is by activation or inhibition of one or more target locus and cleavage of one or more target locus.

[0433] In one aspect, the invention provides a cell comprising a non-naturally occurring Cas13 CRISPR-Cas system comprising one or more dead guide RNAs disclosed or made according to a method or algorithm described herein wherein the expression of one or more gene products has been altered. In an embodiment of the invention, the expression in the cell of two or more gene products has been altered. The invention also provides a cell line from such a cell.

[0434] In one aspect, the invention provides a multicellular organism comprising one or more cells comprising a non-naturally occurring Cas13 CRISPR-Cas system comprising one or more dead guide RNAs disclosed or made according to a method or algorithm described herein. In one aspect, the invention provides a product from a cell, cell line, or multicellular organism comprising a non-naturally occurring Cas13 CRISPR-Cas system comprising one or more dead guide RNAs disclosed or made according to a method or algorithm described herein.

[0435] A further aspect of this invention is the use of gRNA comprising dead guide(s) as described herein, optionally in combination with gRNA comprising guide(s) as described herein or in the state of the art, in combination with systems e.g. cells, transgenic animals, transgenic mice, inducible transgenic animals, inducible transgenic mice) which are engineered for either overexpression of Cas13 or preferably knock in Cas13. As a result a single system (e.g. transgenic animal, cell) can serve as a basis for multiplex gene modifications in systems/network biology. On account of the dead guides, this is now possible in both in vitro, ex vivo, and in vivo.

[0436] For example, once the Cas13 is provided for, one or more dead gRNAs may be provided to direct multiplex gene regulation, and preferably multiplex bidirectional gene regulation. The one or more dead gRNAs may be provided in a spatially and temporally appropriate manner if necessary or desired (for example tissue specific induction of Cas13 expression). On account that the transgenic/inducible Cas13 is provided for (e.g. expressed) in the cell, tissue, animal of interest, both gRNAs comprising dead guides or gRNAs comprising guides are equally effective. In the same manner, a further aspect of this invention is the use of gRNA comprising dead guide(s) as described herein, optionally in combination with gRNA comprising guide(s) as described herein or in the state of the art, in combination with systems (e.g. cells, transgenic animals, transgenic mice, inducible transgenic animals, inducible transgenic mice) which are engineered for knockout Cas13 CRISPR-Cas.

[0437] As a result, the combination of dead guides as described herein with CRISPR applications described herein and CRISPR applications known in the art results in a highly efficient and accurate means for multiplex screening of systems (e.g. network biology). Such screening allows, for example, identification of specific combinations of gene activities for identifying genes responsible for diseases (e.g. on/off combinations), in particular gene related diseases. A preferred application of such screening is cancer. In the same manner, screening for treatment for such diseases is included in the invention. Cells or animals may be exposed to aberrant conditions resulting in disease or disease like effects. Candidate compositions may be provided and screened for an effect in the desired multiplex environment. For example a patient's cancer cells may be screened for which gene combinations will cause them to die, and then use this information to establish appropriate therapies.

[0438] In one aspect, the invention provides a kit comprising one or more of the components described herein. The kit may include dead guides as described herein with or without guides as described herein.

[0439] The structural information provided herein allows for interrogation of dead gRNA interaction with the target DNA and the Cas13 permitting engineering or alteration of dead gRNA structure to optimize functionality of the entire Cas13 CRISPR-Cas system. For example, loops of the dead gRNA may be extended, without colliding with the Cas13 protein by the insertion of adaptor proteins that can bind to RNA. These adaptor proteins can further recruit effector proteins or fusions which comprise one or more functional domains.

[0440] In some preferred embodiments, the functional domain is a transcriptional activation domain, preferably VP64. In some embodiments, the functional domain is a transcription repression domain, preferably KRAB. In some embodiments, the transcription repression domain is SID, or concatemers of SID (e.g. SID4X). In some embodiments, the functional domain is an epigenetic modifying domain, such that an epigenetic modifying enzyme is provided. In some embodiments, the functional domain is an activation domain, which may be the P65 activation domain.

[0441] An aspect of the invention is that the above elements are comprised in a single composition or comprised in individual compositions. These compositions may advantageously be applied to a host to elicit a functional effect on the genomic level.

[0442] In general, the dead gRNA is modified in a manner that provides specific binding sites (e.g. aptamers) for adapter proteins comprising one or more functional domains (e.g. via fusion protein) to bind to. The modified dead gRNA is modified such that once the dead gRNA forms a CRISPR complex (i.e. Cas13 binding to dead gRNA and target) the adapter proteins bind and, the functional domain on the adapter protein is positioned in a spatial orientation which is advantageous for the attributed function to be effective. For example, if the functional domain is a transcription activator (e.g. VP64 or p65), the transcription activator is placed in a spatial orientation which allows it to affect the transcription of the target. Likewise, a transcription repressor will be advantageously positioned to affect the transcription of the target and a nuclease (e.g. Fok1) will be advantageously positioned to cleave or partially cleave the target.

[0443] The skilled person will understand that modifications to the dead gRNA which allow for binding of the adapter+functional domain but not proper positioning of the adapter+functional domain (e.g. due to steric hindrance within the three dimensional structure of the CRISPR complex) are modifications which are not intended. The one or more modified dead gRNA may be modified at the tetra loop, the stem loop 1, stem loop 2, or stem loop 3, as described herein, preferably at either the tetra loop or stem loop 2, and most preferably at both the tetra loop and stem loop 2.

[0444] As explained herein the functional domains may be, for example, one or more domains from the group consisting of methylase activity, demethylase activity, transcription activation activity, transcription repression activity, transcription release factor activity, histone modification activity, RNA cleavage activity, DNA cleavage activity, nucleic acid binding activity, and molecular switches (e.g. light inducible). In some cases it is advantageous that additionally at least one NLS is provided. In some instances, it is advantageous to position the NLS at the N terminus. When more than one functional domain is included, the functional domains may be the same or different.

[0445] The dead gRNA may be designed to include multiple binding recognition sites (e.g. aptamers) specific to the same or different adapter protein. The dead gRNA may be designed to bind to the promoter region −1000−+1 nucleic acids upstream of the transcription start site (i.e. TSS), preferably −200 nucleic acids. This positioning improves functional domains which affect gene activation (e.g. transcription activators) or gene inhibition (e.g. transcription repressors). The modified dead gRNA may be one or more modified dead gRNAs targeted to one or more target loci (e.g. at least 1 gRNA, at least 2 gRNA, at least 5 gRNA, at least 10 gRNA, at least 20 gRNA, at least 30 gRNA, at least 50 gRNA) comprised in a composition.

[0446] The adaptor protein may be any number of proteins that binds to an aptamer or recognition site introduced into the modified dead gRNA and which allows proper positioning of one or more functional domains, once the dead gRNA has been incorporated into the CRISPR complex, to affect the target with the attributed function. As explained in detail in this application such may be coat proteins, preferably bacteriophage coat proteins. The functional domains associated with such adaptor proteins (e.g. in the form of fusion protein) may include, for example, one or more domains from the group consisting of methylase activity, demethylase activity, transcription activation activity, transcription repression activity, transcription release factor activity, histone modification activity, RNA cleavage activity, DNA cleavage activity, nucleic acid binding activity, and molecular switches (e.g. light inducible). Preferred domains are Fok1, VP64, P65, HSF1, MyoD1. In the event that the functional domain is a transcription activator or transcription repressor it is advantageous that additionally at least an NLS is provided and preferably at the N terminus. When more than one functional domain is included, the functional domains may be the same or different. The adaptor protein may utilize known linkers to attach such functional domains.

[0447] Thus, the modified dead gRNA, the (inactivated) Cas13 (with or without functional domains), and the binding protein with one or more functional domains, may each individually be comprised in a composition and administered to a host individually or collectively. Alternatively, these components may be provided in a single composition for administration to a host. Administration to a host may be performed via viral vectors known to the skilled person or described herein for delivery to a host (e.g. lentiviral vector, adenoviral vector, AAV vector). As explained herein, use of different selection markers (e.g. for lentiviral gRNA selection) and concentration of gRNA (e.g. dependent on whether multiple gRNAs are used) may be advantageous for eliciting an improved effect.

[0448] On the basis of this concept, several variations are appropriate to elicit a genomic locus event, including DNA cleavage, gene activation, or gene deactivation. Using the provided compositions, the person skilled in the art can advantageously and specifically target single or multiple loci with the same or different functional domains to elicit one or more genomic locus events. The compositions may be applied in a wide variety of methods for screening in libraries in cells and functional modeling in vivo (e.g. gene activation of lincRNA and identification of function; gain-of-function modeling; loss-of-function modeling; the use the compositions of the invention to establish cell lines and transgenic animals for optimization and screening purposes).

[0449] The current invention comprehends the use of the compositions of the current invention to establish and utilize conditional or inducible CRISPR transgenic cell/animals, which are not believed prior to the present invention or application. For example, the target cell comprises Cas13 conditionally or inducibly (e.g. in the form of Cre dependent constructs) and/or the adapter protein conditionally or inducibly and, on expression of a vector introduced into the target cell, the vector expresses that which induces or gives rise to the condition of Cas13 expression and/or adaptor expression in the target cell. By applying the teaching and compositions of the current invention with the known method of creating a CRISPR complex, inducible genomic events affected by functional domains are also an aspect of the current invention. One example of this is the creation of a CRISPR knock-in/conditional transgenic animal (e.g. mouse comprising e.g. a Lox-Stop-polyA-Lox(LSL) cassette) and subsequent delivery of one or more compositions providing one or more modified dead gRNA (e.g. −200 nucleotides to TSS of a target gene of interest for gene activation purposes) as described herein (e.g. modified dead gRNA with one or more aptamers recognized by coat proteins, e.g. MS2), one or more adapter proteins as described herein (MS2 binding protein linked to one or more VP64) and means for inducing the conditional animal (e.g. Cre recombinase for rendering Cas13 expression inducible). Alternatively, the adaptor protein may be provided as a conditional or inducible element with a conditional or inducible Cas13 to provide an effective model for screening purposes, which advantageously only requires minimal design and administration of specific dead gRNAs for a broad number of applications.

[0450] In another aspect the dead guides are further modified to improve specificity. Protected dead guides may be synthesized, whereby secondary structure is introduced into the 3′ end of the dead guide to improve its specificity. A protected guide RNA (pgRNA) comprises a guide sequence capable of hybridizing to a target sequence in a genomic locus of interest in a cell and a protector strand, wherein the protector strand is optionally complementary to the guide sequence and wherein the guide sequence may in part be hybridizable to the protector strand. The pgRNA optionally includes an extension sequence. The thermodynamics of the pgRNA-target DNA hybridization is determined by the number of bases complementary between the guide RNA and target DNA. By employing ‘thermodynamic protection’, specificity of dead gRNA can be improved by adding a protector sequence. For example, one method adds a complementary protector strand of varying lengths to the 3′ end of the guide sequence within the dead gRNA. As a result, the protector strand is bound to at least a portion of the dead gRNA and provides for a protected gRNA (pgRNA). In turn, the dead gRNA references herein may be easily protected using the described embodiments, resulting in pgRNA. The protector strand can be either a separate RNA transcript or strand or a chimeric version joined to the 3′ end of the dead gRNA guide sequence.

### Tandem Guides and Uses in a Multiplex (Tandem) Targeting Approach

[0451] The inventors have shown that CRISPR enzymes as defined herein can employ more than one RNA guide without losing activity. This enables the use of the CRISPR enzymes, systems or complexes as defined herein for targeting multiple DNA targets, genes or gene loci, with a single enzyme, system or complex as defined herein. The guide RNAs may be tandemly arranged, optionally separated by a nucleotide sequence such as a direct repeat as defined herein. The position of the different guide RNAs is the tandem does not influence the activity. It is noted that the terms “CRISPR-Cas system”, “CRISP-Cas complex” “CRISPR complex” and “CRISPR system” are used interchangeably. Also the terms “CRISPR enzyme”, “Cas enzyme”, or “CRISPR-Cas enzyme”, can be used interchangeably. In preferred embodiments, said CRISPR enzyme, CRISP-Cas enzyme or Cas enzyme is Cas13, or any one of the modified or mutated variants thereof described herein elsewhere.

[0452] In one aspect, the invention provides a non-naturally occurring or engineered CRISPR enzyme, preferably a class 2 CRISPR enzyme, preferably a Type V or VI CRISPR enzyme as described herein, such as without limitation Cas13 as described herein elsewhere, used for tandem or multiplex targeting. It is to be understood that any of the CRISPR (or CRISPR-Cas or Cas) enzymes, complexes, or systems according to the invention as described herein elsewhere may be used in such an approach. Any of the methods, products, compositions and uses as described herein elsewhere are equally applicable with the multiplex or tandem targeting approach further detailed below. By means of further guidance, the following particular aspects and embodiments are provided.

[0453] In one aspect, the invention provides for the use of a Cas13 enzyme, complex or system as defined herein for targeting multiple gene loci. In one embodiment, this can be established by using multiple (tandem or multiplex) guide RNA (gRNA) sequences.

[0454] In one aspect, the invention provides methods for using one or more elements of a Cas13 enzyme, complex or system as defined herein for tandem or multiplex targeting, wherein said CRISP system comprises multiple guide RNA sequences. Preferably, said gRNA sequences are separated by a nucleotide sequence, such as a direct repeat as defined herein elsewhere.

[0455] The Cas13 enzyme, system or complex as defined herein provides an effective means for modifying multiple target polynucleotides. The Cas13 enzyme, system or complex as defined herein has a wide variety of utility including modifying (e.g., deleting, inserting, translocating, inactivating, activating) one or more target polynucleotides in a multiplicity of cell types. As such the Cas13 enzyme, system or complex as defined herein of the invention has a broad spectrum of applications in, e.g., gene therapy, drug screening, disease diagnosis, and prognosis, including targeting multiple gene loci within a single CRISPR system.

[0456] In one aspect, the invention provides a Cas13 enzyme, system or complex as defined herein, i.e. a Cas13 CRISPR-Cas complex having a Cas13 protein having at least one destabilization domain associated therewith, and multiple guide RNAs that target multiple nucleic acid molecules such as DNA molecules, whereby each of said multiple guide RNAs specifically targets its corresponding nucleic acid molecule, e.g., DNA molecule. Each nucleic acid molecule target, e.g., DNA molecule can encode a gene product or encompass a gene locus. Using multiple guide RNAs hence enables the targeting of multiple gene loci or multiple genes. In some embodiments the Cas13 enzyme may cleave the RNA molecule encoding the gene product. In some embodiments expression of the gene product is altered. The Cas13 protein and the guide RNAs do not naturally occur together. The invention comprehends the guide RNAs comprising tandemly arranged guide sequences. The invention further comprehends coding sequences for the Cas13 protein being codon optimized for expression in a eukaryotic cell. In a preferred embodiment the eukaryotic cell is a mammalian cell, a plant cell or a yeast cell and in a more preferred embodiment the mammalian cell is a human cell. Expression of the gene product may be decreased. The Cas13 enzyme may form part of a CRISPR system or complex, which further comprises tandemly arranged guide RNAs (gRNAs) comprising a series of 2, 3, 4, 5, 6, 7, 8, 9, 10, 15, 25, 25, 30, or more than 30 guide sequences, each capable of specifically hybridizing to a target sequence in a genomic locus of interest in a cell. In some embodiments, the functional Cas13 CRISPR system or complex binds to the multiple target sequences. In some embodiments, the functional CRISPR system or complex may edit the multiple target sequences, e.g., the target sequences may comprise a genomic locus, and in some embodiments there may be an alteration of gene expression. In some embodiments, the functional CRISPR system or complex may comprise further functional domains. In some embodiments, the invention provides a method for altering or modifying expression of multiple gene products. The method may comprise introducing into a cell containing said target nucleic acids, e.g., DNA molecules, or containing and expressing target nucleic acid, e.g., DNA molecules; for instance, the target nucleic acids may encode gene products or provide for expression of gene products (e.g., regulatory sequences).

[0457] In preferred embodiments the CRISPR enzyme used for multiplex targeting is Cas13, or the CRISPR system or complex comprises Cas13. In some embodiments, the CRISPR enzyme used for multiplex targeting is AsCas13, or the CRISPR system or complex used for multiplex targeting comprises an AsCas13. In some embodiments, the CRISPR enzyme is an LbCas13, or the CRISPR system or complex comprises LbCas13. In some embodiments, the Cas enzyme used for multiplex targeting cleaves both strands of DNA to produce a double strand break (DSB). In some embodiments, the CRISPR enzyme used for multiplex targeting is a nickase. In some embodiments, the Cas13 enzyme used for multiplex targeting is a dual nickase. In some embodiments, the Cas13 enzyme used for multiplex targeting is a Cas13 enzyme such as a DD Cas13 enzyme as defined herein elsewhere.

[0458] In some general embodiments, the Cas13 enzyme used for multiplex targeting is associated with one or more functional domains. In some more specific embodiments, the CRISPR enzyme used for multiplex targeting is a deadCas13 as defined herein elsewhere.

[0459] In an aspect, the present invention provides a means for delivering the Cas13 enzyme, system or complex for use in multiple targeting as defined herein or the polynucleotides defined herein. Non-limiting examples of such delivery means are e.g. particle(s) delivering component(s) of the complex, vector(s) comprising the polynucleotide(s) discussed herein (e.g., encoding the CRISPR enzyme, providing the nucleotides encoding the CRISPR complex). In some embodiments, the vector may be a plasmid or a viral vector such as AAV, or lentivirus. Transient transfection with plasmids, e.g., into HEK cells may be advantageous, especially given the size limitations of AAV and that while Cas13 fits into AAV, one may reach an upper limit with additional guide RNAs.

[0460] Also provided is a model that constitutively expresses the Cas13 enzyme, complex or system as used herein for use in multiplex targeting. The organism may be transgenic and may have been transfected with the present vectors or may be the offspring of an organism so transfected. In a further aspect, the present invention provides compositions comprising the CRISPR enzyme, system and complex as defined herein or the polynucleotides or vectors described herein. Also provides are Cas13 CRISPR systems or complexes comprising multiple guide RNAs, preferably in a tandemly arranged format. Said different guide RNAs may be separated by nucleotide sequences such as direct repeats.

[0461] Also provided is a method of treating a subject, e.g., a subject in need thereof, comprising inducing gene editing by transforming the subject with the polynucleotide encoding the Cas13 CRISPR system or complex or any of polynucleotides or vectors described herein and administering them to the subject. A suitable repair template may also be provided, for example delivered by a vector comprising said repair template. Also provided is a method of treating a subject, e.g., a subject in need thereof, comprising inducing transcriptional activation or repression of multiple target gene loci by transforming the subject with the polynucleotides or vectors described herein, wherein said polynucleotide or vector encodes or comprises the Cas13 enzyme, complex or system comprising multiple guide RNAs, preferably tandemly arranged. Where any treatment is occurring ex vivo, for example in a cell culture, then it will be appreciated that the term ‘subject’ may be replaced by the phrase “cell or cell culture.”

[0462] Compositions comprising Cas13 enzyme, complex or system comprising multiple guide RNAs, preferably tandemly arranged, or the polynucleotide or vector encoding or comprising said Cas13 enzyme, complex or system comprising multiple guide RNAs, preferably tandemly arranged, for use in the methods of treatment as defined herein elsewhere are also provided. A kit of parts may be provided including such compositions. Use of said composition in the manufacture of a medicament for such methods of treatment are also provided. Use of a Cas13 CRISPR system in screening is also provided by the present invention, e.g., gain of function screens. Cells which are artificially forced to overexpress a gene are be able to down regulate the gene over time (re-establishing equilibrium) e.g. by negative feedback loops. By the time the screen starts the unregulated gene might be reduced again. Using an inducible Cas13 activator allows one to induce transcription right before the screen and therefore minimizes the chance of false negative hits. Accordingly, by use of the instant invention in screening, e.g., gain of function screens, the chance of false negative results may be minimized.

[0463] In one aspect, the invention provides an engineered, non-naturally occurring CRISPR system comprising a Cas13 protein and multiple guide RNAs that each specifically target a DNA molecule encoding a gene product in a cell, whereby the multiple guide RNAs each target their specific DNA molecule encoding the gene product and the Cas13 protein cleaves the target DNA molecule encoding the gene product, whereby expression of the gene product is altered; and, wherein the CRISPR protein and the guide RNAs do not naturally occur together. The invention comprehends the multiple guide RNAs comprising multiple guide sequences, preferably separated by a nucleotide sequence such as a direct repeat and optionally fused to a tracr sequence. In an embodiment of the invention the CRISPR protein is a type V or VI CRISPR-Cas protein and in a more preferred embodiment the CRISPR protein is a Cas13 protein. The invention further comprehends a Cas13 protein being codon optimized for expression in a eukaryotic cell. In a preferred embodiment the eukaryotic cell is a mammalian cell and in a more preferred embodiment the mammalian cell is a human cell. In a further embodiment of the invention, the expression of the gene product is decreased.

[0464] In another aspect, the invention provides an engineered, non-naturally occurring vector system comprising one or more vectors comprising a first regulatory element operably linked to the multiple Cas13 CRISPR system guide RNAs that each specifically target a DNA molecule encoding a gene product and a second regulatory element operably linked coding for a CRISPR protein. Both regulatory elements may be located on the same vector or on different vectors of the system. The multiple guide RNAs target the multiple DNA molecules encoding the multiple gene products in a cell and the CRISPR protein may cleave the multiple DNA molecules encoding the gene products (it may cleave one or both strands or have substantially no nuclease activity), whereby expression of the multiple gene products is altered; and, wherein the CRISPR protein and the multiple guide RNAs do not naturally occur together. In a preferred embodiment the CRISPR protein is Cas13 protein, optionally codon optimized for expression in a eukaryotic cell. In a preferred embodiment the eukaryotic cell is a mammalian cell, a plant cell or a yeast cell and in a more preferred embodiment the mammalian cell is a human cell. In a further embodiment of the invention, the expression of each of the multiple gene products is altered, preferably decreased.

[0465] In one aspect, the invention provides a vector system comprising one or more vectors. In some embodiments, the system comprises: (a) a first regulatory element operably linked to a direct repeat sequence and one or more insertion sites for inserting one or more guide sequences up- or downstream (whichever applicable) of the direct repeat sequence, wherein when expressed, the one or more guide sequence(s) direct(s) sequence-specific binding of the CRISPR complex to the one or more target sequence(s) in a eukaryotic cell, wherein the CRISPR complex comprises a Cas13 enzyme complexed with the one or more guide sequence(s) that is hybridized to the one or more target sequence(s); and (b) a second regulatory element operably linked to an enzyme-coding sequence encoding said Cas13 enzyme, preferably comprising at least one nuclear localization sequence and/or at least one NES; wherein components (a) and (b) are located on the same or different vectors of the system. Where applicable, a tracr sequence may also be provided. In some embodiments, component (a) further comprises two or more guide sequences operably linked to the first regulatory element, wherein when expressed, each of the two or more guide sequences direct sequence specific binding of a Cas13 CRISPR complex to a different target sequence in a eukaryotic cell. In some embodiments, the CRISPR complex comprises one or more nuclear localization sequences and/or one or more NES of sufficient strength to drive accumulation of said Cas13 CRISPR complex in a detectable amount in or out of the nucleus of a eukaryotic cell. In some embodiments, the first regulatory element is a polymerase III promoter. In some embodiments, the second regulatory element is a polymerase II promoter. In some embodiments, each of the guide sequences is at least 16, 17, 18, 19, 20, 25 nucleotides, or between 16-30, or between 16-25, or between 16-20 nucleotides in length.

[0466] Recombinant expression vectors can comprise the polynucleotides encoding the Cas13 enzyme, system or complex for use in multiple targeting as defined herein in a form suitable for expression of the nucleic acid in a host cell, which means that the recombinant expression vectors include one or more regulatory elements, which may be selected on the basis of the host cells to be used for expression, that is operatively-linked to the nucleic acid sequence to be expressed. Within a recombinant expression vector, “operably linked” is intended to mean that the nucleotide sequence of interest is linked to the regulatory element(s) in a manner that allows for expression of the nucleotide sequence (e.g., in an in vitro transcription/translation system or in a host cell when the vector is introduced into the host cell).

[0467] In some embodiments, a host cell is transiently or non-transiently transfected with one or more vectors comprising the polynucleotides encoding the Cas13 enzyme, system or complex for use in multiple targeting as defined herein. In some embodiments, a cell is transfected as it naturally occurs in a subject. In some embodiments, a cell that is transfected is taken from a subject. In some embodiments, the cell is derived from cells taken from a subject, such as a cell line. A wide variety of cell lines for tissue culture are known in the art and exemplified herein elsewhere. Cell lines are available from a variety of sources known to those with skill in the art (see, e.g., the American Type Culture Collection (ATCC) (Manassas, Va.)). In some embodiments, a cell transfected with one or more vectors comprising the polynucleotides encoding the Cas13 enzyme, system or complex for use in multiple targeting as defined herein is used to establish a new cell line comprising one or more vector-derived sequences. In some embodiments, a cell transiently transfected with the components of a Cas13 CRISPR system or complex for use in multiple targeting as described herein (such as by transient transfection of one or more vectors, or transfection with RNA), and modified through the activity of a Cas13 CRISPR system or complex, is used to establish a new cell line comprising cells containing the modification but lacking any other exogenous sequence. In some embodiments, cells transiently or non-transiently transfected with one or more vectors comprising the polynucleotides encoding the Cas13 enzyme, system or complex for use in multiple targeting as defined herein, or cell lines derived from such cells are used in assessing one or more test compounds.

[0468] The term “regulatory element” is as defined herein elsewhere.

[0469] Advantageous vectors include lentiviruses and adeno-associated viruses, and types of such vectors can also be selected for targeting particular types of cells.

[0470] In one aspect, the invention provides a eukaryotic host cell comprising (a) a first regulatory element operably linked to a direct repeat sequence and one or more insertion sites for inserting one or more guide RNA sequences up- or downstream (whichever applicable) of the direct repeat sequence, wherein when expressed, the guide sequence(s) direct(s) sequence-specific binding of the Cas13 CRISPR complex to the respective target sequence(s) in a eukaryotic cell, wherein the Cas13 CRISPR complex comprises a Cas13 enzyme complexed with the one or more guide sequence(s) that is hybridized to the respective target sequence(s); and/or (b) a second regulatory element operably linked to an enzyme-coding sequence encoding said Cas13 enzyme comprising preferably at least one nuclear localization sequence and/or NES. In some embodiments, the host cell comprises components (a) and (b). Where applicable, a tracr sequence may also be provided. In some embodiments, component (a), component (b), or components (a) and (b) are stably integrated into a genome of the host eukaryotic cell. In some embodiments, component (a) further comprises two or more guide sequences operably linked to the first regulatory element, and optionally separated by a direct repeat, wherein when expressed, each of the two or more guide sequences direct sequence specific binding of a Cas13 CRISPR complex to a different target sequence in a eukaryotic cell. In some embodiments, the Cas13 enzyme comprises one or more nuclear localization sequences and/or nuclear export sequences or NES of sufficient strength to drive accumulation of said CRISPR enzyme in a detectable amount in and/or out of the nucleus of a eukaryotic cell.

[0471] In some embodiments, the Cas13 enzyme is a type V or VI CRISPR system enzyme. In some embodiments, the Cas enzyme is a Cas13 enzyme. In some embodiments, the Cas13 enzyme is derived from Francisella tularensis 1, Francisella tularensis subsp. novicida, Prevotella albensis, Lachnospiraceae bacterium MC2017 1, Butyrivibrio proteoclasticus, Peregrinibacteria bacterium GW2011_GWA2_33_10, Parcubacteria bacterium GW2011_GWC2_44_17, Smithella sp. SCADC, Acidaminococcus sp. BV3L6, Lachnospiraceae bacterium MA2020, Candidatus Methanoplasma termitum, Eubacterium eligens, Moraxella bovoculi 237, Leptospira inadai, Lachnospiraceae bacterium ND2006, Porphyromonas crevioricanis 3, Prevotella disiens, or Porphyromonas macacae Cas13, and may include further alterations or mutations of the Cas13 as defined herein elsewhere, and can be a chimeric Cas13. In some embodiments, the Cas13 enzyme is codon-optimized for expression in a eukaryotic cell. In some embodiments, the CRISPR enzyme directs cleavage of one or two strands at the location of the target sequence. In some embodiments, the first regulatory element is a polymerase III promoter. In some embodiments, the second regulatory element is a polymerase II promoter. In some embodiments, the one or more guide sequence(s) is (are each) at least 16, 17, 18, 19, 20, 25 nucleotides, or between 16-30, or between 16-25, or between 16-20 nucleotides in length. When multiple guide RNAs are used, they are preferably separated by a direct repeat sequence. In an aspect, the invention provides a non-human eukaryotic organism; preferably a multicellular eukaryotic organism, comprising a eukaryotic host cell according to any of the described embodiments. In other aspects, the invention provides a eukaryotic organism; preferably a multicellular eukaryotic organism, comprising a eukaryotic host cell according to any of the described embodiments. The organism in some embodiments of these aspects may be an animal; for example a mammal. Also, the organism may be an arthropod such as an insect. The organism also may be a plant. Further, the organism may be a fungus.

[0472] In one aspect, the invention provides a kit comprising one or more of the components described herein. In some embodiments, the kit comprises a vector system and instructions for using the kit. In some embodiments, the vector system comprises (a) a first regulatory element operably linked to a direct repeat sequence and one or more insertion sites for inserting one or more guide sequences up- or downstream (whichever applicable) of the direct repeat sequence, wherein when expressed, the guide sequence directs sequence-specific binding of a Cas13 CRISPR complex to a target sequence in a eukaryotic cell, wherein the Cas13 CRISPR complex comprises a Cas13 enzyme complexed with the guide sequence that is hybridized to the target sequence; and/or (b) a second regulatory element operably linked to an enzyme-coding sequence encoding said Cas13 enzyme comprising a nuclear localization sequence. Where applicable, a tracr sequence may also be provided. In some embodiments, the kit comprises components (a) and (b) located on the same or different vectors of the system. In some embodiments, component (a) further comprises two or more guide sequences operably linked to the first regulatory element, wherein when expressed, each of the two or more guide sequences direct sequence specific binding of a CRISPR complex to a different target sequence in a eukaryotic cell. In some embodiments, the Cas13 enzyme comprises one or more nuclear localization sequences of sufficient strength to drive accumulation of said CRISPR enzyme in a detectable amount in the nucleus of a eukaryotic cell. In some embodiments, the CRISPR enzyme is a type V or VI CRISPR system enzyme. In some embodiments, the CRISPR enzyme is a Cas13 enzyme. In some embodiments, the Cas13 enzyme is derived from Francisella tularensis 1, Francisella tularensis subsp. novicida, Prevotella albensis, Lachnospiraceae bacterium MC2017 1, Butyrivibrio proteoclasticus, Peregrinibacteria bacterium GW2011_GWA2_33_10, Parcubacteria bacterium GW2011_GWC2_44_17, Smithella sp. SCADC, Acidaminococcus sp. BV3L6, Lachnospiraceae bacterium MA2020, Candidatus Methanoplasma termitum, Eubacterium eligens, Moraxella bovoculi 237, Leptospira inadai, bacterium ND2006, Porphyromonas crevioricanis 3, Prevotella disiens, or Porphyromonas macacae Cas13 (e.g., modified to have or be associated with at least one DD), and may include further alteration or mutation of the Cas13, and can be a chimeric Cas13. In some embodiments, the DD-CRISPR enzyme is codon-optimized for expression in a eukaryotic cell. In some embodiments, the DD-CRISPR enzyme directs cleavage of one or two strands at the location of the target sequence. In some embodiments, the DD-CRISPR enzyme lacks or substantially DNA strand cleavage activity (e.g., no more than 5% nuclease activity as compared with a wild type enzyme or enzyme not having the mutation or alteration that decreases nuclease activity). In some embodiments, the first regulatory element is a polymerase III promoter. In some embodiments, the second regulatory element is a polymerase II promoter. In some embodiments, the guide sequence is at least 16, 17, 18, 19, 20, 25 nucleotides, or between 16-30, or between 16-25, or between 16-20 nucleotides in length.

[0473] In one aspect, the invention provides a method of modifying multiple target polynucleotides in a host cell such as a eukaryotic cell. In some embodiments, the method comprises allowing a Cas13 CRISPR complex to bind to multiple target polynucleotides, e.g., to effect cleavage of said multiple target polynucleotides, thereby modifying multiple target polynucleotides, wherein the Cas13 CRISPR complex comprises a Cas13 enzyme complexed with multiple guide sequences each of the being hybridized to a specific target sequence within said target polynucleotide, wherein said multiple guide sequences are linked to a direct repeat sequence. Where applicable, a tracr sequence may also be provided (e.g. to provide a single guide RNA, sgRNA). In some embodiments, said cleavage comprises cleaving one or two strands at the location of each of the target sequence by said Cas13 enzyme. In some embodiments, said cleavage results in decreased transcription of the multiple target genes. In some embodiments, the method further comprises repairing one or more of said cleaved target polynucleotide by homologous recombination with an exogenous template polynucleotide, wherein said repair results in a mutation comprising an insertion, deletion, or substitution of one or more nucleotides of one or more of said target polynucleotides. In some embodiments, said mutation results in one or more amino acid changes in a protein expressed from a gene comprising one or more of the target sequence(s). In some embodiments, the method further comprises delivering one or more vectors to said eukaryotic cell, wherein the one or more vectors drive expression of one or more of: the Cas13 enzyme and the multiple guide RNA sequence linked to a direct repeat sequence. Where applicable, a tracr sequence may also be provided. In some embodiments, said vectors are delivered to the eukaryotic cell in a subject. In some embodiments, said modifying takes place in said eukaryotic cell in a cell culture. In some embodiments, the method further comprises isolating said eukaryotic cell from a subject prior to said modifying. In some embodiments, the method further comprises returning said eukaryotic cell and/or cells derived therefrom to said subject.

[0474] In one aspect, the invention provides a method of modifying expression of multiple polynucleotides in a eukaryotic cell. In some embodiments, the method comprises allowing a Cas13 CRISPR complex to bind to multiple polynucleotides such that said binding results in increased or decreased expression of said polynucleotides; wherein the Cas13 CRISPR complex comprises a Cas13 enzyme complexed with multiple guide sequences each specifically hybridized to its own target sequence within said polynucleotide, wherein said guide sequences are linked to a direct repeat sequence. Where applicable, a tracr sequence may also be provided. In some embodiments, the method further comprises delivering one or more vectors to said eukaryotic cells, wherein the one or more vectors drive expression of one or more of: the Cas13 enzyme and the multiple guide sequences linked to the direct repeat sequences. Where applicable, a tracr sequence may also be provided.

[0475] In one aspect, the invention provides a recombinant polynucleotide comprising multiple guide RNA sequences up- or downstream (whichever applicable) of a direct repeat sequence, wherein each of the guide sequences when expressed directs sequence-specific binding of a Cas13 CRISPR complex to its corresponding target sequence present in a eukaryotic cell. In some embodiments, the target sequence is a viral sequence present in a eukaryotic cell. Where applicable, a tracr sequence may also be provided. In some embodiments, the target sequence is a proto-oncogene or an oncogene.

[0476] Aspects of the invention encompass a non-naturally occurring or engineered composition that may comprise a guide RNA (gRNA) comprising a guide sequence capable of hybridizing to a target sequence in a genomic locus of interest in a cell and a Cas13 enzyme as defined herein that may comprise at least one or more nuclear localization sequences.

[0477] An aspect of the invention encompasses methods of modifying a genomic locus of interest to change gene expression in a cell by introducing into the cell any of the compositions described herein.

[0478] An aspect of the invention is that the above elements are comprised in a single composition or comprised in individual compositions. These compositions may advantageously be applied to a host to elicit a functional effect on the genomic level.

[0479] As used herein, the term “guide RNA” or “gRNA” has the leaning as used herein elsewhere and comprises any polynucleotide sequence having sufficient complementarity with a target nucleic acid sequence to hybridize with the target nucleic acid sequence and direct sequence-specific binding of a nucleic acid-targeting complex to the target nucleic acid sequence. Each gRNA may be designed to include multiple binding recognition sites (e.g., aptamers) specific to the same or different adapter protein. Each gRNA may be designed to bind to the promoter region −1000−+1 nucleic acids upstream of the transcription start site (i.e. TSS), preferably −200 nucleic acids. This positioning improves functional domains which affect gene activation (e.g., transcription activators) or gene inhibition (e.g., transcription repressors). The modified gRNA may be one or more modified gRNAs targeted to one or more target loci (e.g., at least 1 gRNA, at least 2 gRNA, at least 5 gRNA, at least 10 gRNA, at least 20 gRNA, at least 30 g RNA, at least 50 gRNA) comprised in a composition. Said multiple gRNA sequences can be tandemly arranged and are preferably separated by a direct repeat.

[0480] Thus, gRNA, the CRISPR enzyme as defined herein may each individually be comprised in a composition and administered to a host individually or collectively. Alternatively, these components may be provided in a single composition for administration to a host. Administration to a host may be performed via viral vectors known to the skilled person or described herein for delivery to a host (e.g., lentiviral vector, adenoviral vector, AAV vector). As explained herein, use of different selection markers (e.g., for lentiviral sgRNA selection) and concentration of gRNA (e.g., dependent on whether multiple gRNAs are used) may be advantageous for eliciting an improved effect. On the basis of this concept, several variations are appropriate to elicit a genomic locus event, including DNA cleavage, gene activation, or gene deactivation. Using the provided compositions, the person skilled in the art can advantageously and specifically target single or multiple loci with the same or different functional domains to elicit one or more genomic locus events. The compositions may be applied in a wide variety of methods for screening in libraries in cells and functional modeling in vivo (e.g., gene activation of lincRNA and identification of function; gain-of-function modeling; loss-of-function modeling; the use the compositions of the invention to establish cell lines and transgenic animals for optimization and screening purposes).

[0481] The current invention comprehends the use of the compositions of the current invention to establish and utilize conditional or inducible CRISPR transgenic cell/animals; see, e.g., Platt et al., Cell (2014), 159(2): 440-455, or PCT patent publications cited herein, such as WO 2014/093622 (PCT/US2013/074667). For example, cells or animals such as non-human animals, e.g., vertebrates or mammals, such as rodents, e.g., mice, rats, or other laboratory or field animals, e.g., cats, dogs, sheep, etc., may be ‘knock-in’ whereby the animal conditionally or inducibly expresses Cas13 akin to Platt et al. The target cell or animal thus comprises the CRISPR enzyme (e.g., Cas13) conditionally or inducibly (e.g., in the form of Cre dependent constructs), on expression of a vector introduced into the target cell, the vector expresses that which induces or gives rise to the condition of the CRISPR enzyme (e.g., Cas13) expression in the target cell. By applying the teaching and compositions as defined herein with the known method of creating a CRISPR complex, inducible genomic events are also an aspect of the current invention. Examples of such inducible events have been described herein elsewhere.

[0482] In some embodiments, phenotypic alteration is preferably the result of genome modification when a genetic disease is targeted, especially in methods of therapy and preferably where a repair template is provided to correct or alter the phenotype.

[0483] In some embodiments diseases that may be targeted include those concerned with disease-causing splice defects.

[0484] In some embodiments, cellular targets include Hemopoietic Stem/Progenitor Cells (CD34+); Human T cells; and Eye (retinal cells)—for example photoreceptor precursor cells.

[0485] In some embodiments Gene targets include: Human Beta Globin—HBB (for treating Sickle Cell Anemia, including by stimulating gene-conversion (using closely related HBD gene as an endogenous template)); CD3 (T-Cells); and CEP920—retina (eye).

[0486] In some embodiments disease targets also include: cancer; Sickle Cell Anemia (based on a point mutation); HBV, HIV; Beta-Thalassemia; and ophthalmic or ocular disease—for example Leber Congenital Amaurosis (LCA)-causing Splice Defect.

[0487] In some embodiments delivery methods include: Cationic Lipid Mediated “direct” delivery of Enzyme-Guide complex (RiboNucleoProtein) and electroporation of plasmid DNA.

[0488] Methods, products and uses described herein may be used for non-therapeutic purposes. Furthermore, any of the methods described herein may be applied in vitro and ex vivo.

[0489] In an aspect, provided is a non-naturally occurring or engineered composition comprising:

I. two or more CRISPR-Cas system polynucleotide sequences comprising

[0490] (a) a first guide sequence capable of hybridizing to a first target sequence in a polynucleotide locus,

[0491] (b) a second guide sequence capable of hybridizing to a second target sequence in a polynucleotide locus,

[0492] (c) a direct repeat sequence,

[0493] and

II. a Cas13 enzyme or a second polynucleotide sequence encoding it,

[0494] wherein when transcribed, the first and the second guide sequences direct sequence-specific binding of a first and a second Cas13 CRISPR complex to the first and second target sequences respectively,

[0495] wherein the first CRISPR complex comprises the Cas13 enzyme complexed with the first guide sequence that is hybridizable to the first target sequence,

[0496] wherein the second CRISPR complex comprises the Cas13 enzyme complexed with the second guide sequence that is hybridizable to the second target sequence, and

[0497] wherein the first guide sequence directs cleavage of one strand of the DNA duplex near the first target sequence and the second guide sequence directs cleavage of the other strand near the second target sequence inducing a double strand break, thereby modifying the organism or the non-human or non-animal organism. Similarly, compositions comprising more than two guide RNAs can be envisaged e.g. each specific for one target, and arranged tandemly in the composition or CRISPR system or complex as described herein.

[0498] In another embodiment, the Cas13 is delivered into the cell as a protein. In another and particularly preferred embodiment, the Cas13 is delivered into the cell as a protein or as a nucleotide sequence encoding it. Delivery to the cell as a protein may include delivery of a Ribonucleoprotein (RNP) complex, where the protein is complexed with the multiple guides.

[0499] In an aspect, host cells and cell lines modified by or comprising the compositions, systems or modified enzymes of present invention are provided, including stem cells, and progeny thereof.

[0500] In an aspect, methods of cellular therapy are provided, where, for example, a single cell or a population of cells is sampled or cultured, wherein that cell or cells is or has been modified ex vivo as described herein, and is then re-introduced (sampled cells) or introduced (cultured cells) into the organism. Stem cells, whether embryonic or induce pluripotent or totipotent stem cells, are also particularly preferred in this regard. But, of course, in vivo embodiments are also envisaged.

[0501] Inventive methods can further comprise delivery of templates, such as repair templates, which may be dsODN or ssODN, see below. Delivery of templates may be via the cotemporaneous or separate from delivery of any or all the CRISPR enzyme or guide RNAs and via the same delivery mechanism or different. In some embodiments, it is preferred that the template is delivered together with the guide RNAs and, preferably, also the CRISPR enzyme. An example may be an AAV vector where the CRISPR enzyme is AsCas or LbCas.

[0502] Inventive methods can further comprise: (a) delivering to the cell a double-stranded oligodeoxynucleotide (dsODN) comprising overhangs complimentary to the overhangs created by said double strand break, wherein said dsODN is integrated into the locus of interest; or -(b) delivering to the cell a single-stranded oligodeoxynucleotide (ssODN), wherein said ssODN acts as a template for homology directed repair of said double strand break. Inventive methods can be for the prevention or treatment of disease in an individual, optionally wherein said disease is caused by a defect in said locus of interest. Inventive methods can be conducted in vivo in the individual or ex vivo on a cell taken from the individual, optionally wherein said cell is returned to the individual.

[0503] The invention also comprehends products obtained from using CRISPR enzyme or Cas enzyme or Cas13 enzyme or CRISPR-CRISPR enzyme or CRISPR-Cas system or CRISPR-Cas13 system for use in tandem or multiple targeting as defined herein.

### Escorted Guides for the Cas13 CRISPR-Cas System According to the Invention

[0504] In one aspect the invention provides escorted Cas13 CRISPR-Cas systems or complexes, especially such a system involving an escorted Cas13 CRISPR-Cas system guide. By “escorted” is meant that the Cas13 CRISPR-Cas system or complex or guide is delivered to a selected time or place within a cell, so that activity of the Cas13 CRISPR-Cas system or complex or guide is spatially or temporally controlled. For example, the activity and destination of the Cas13 CRISPR-Cas system or complex or guide may be controlled by an escort RNA aptamer sequence that has binding affinity for an aptamer ligand, such as a cell surface protein or other localized cellular component. Alternatively, the escort aptamer may for example be responsive to an aptamer effector on or in the cell, such as a transient effector, such as an external energy source that is applied to the cell at a particular time.

[0505] The escorted Cas13 CRISPR-Cas systems or complexes have a gRNA with a functional structure designed to improve gRNA structure, architecture, stability, genetic expression, or any combination thereof. Such a structure can include an aptamer.

[0506] Aptamers are biomolecules that can be designed or selected to bind tightly to other ligands, for example using a technique called systematic evolution of ligands by exponential enrichment (SELEX; Tuerk C, Gold L: “Systematic evolution of ligands by exponential enrichment: RNA ligands to bacteriophage T4 DNA polymerase.” Science 1990, 249:505-510). Nucleic acid aptamers can for example be selected from pools of random-sequence oligonucleotides, with high binding affinities and specificities for a wide range of biomedically relevant targets, suggesting a wide range of therapeutic utilities for aptamers (Keefe, Anthony D., Supriya Pai, and Andrew Ellington. “Aptamers as therapeutics.” Nature Reviews Drug Discovery 9.7 (2010): 537-550). These characteristics also suggest a wide range of uses for aptamers as drug delivery vehicles (Levy-Nissenbaum, Etgar, et al. “Nanotechnology and aptamers: applications in drug delivery.” Trends in biotechnology 26.8 (2008): 442-449; and, Hicke B J, Stephens A W. “Escort aptamers: a delivery service for diagnosis and therapy.” J Clin Invest 2000, 106:923-928.). Aptamers may also be constructed that function as molecular switches, responding to a que by changing properties, such as RNA aptamers that bind fluorophores to mimic the activity of green fluorescent protein (Paige, Jeremy S., Karen Y. Wu, and Samie R. Jaffrey. “RNA mimics of green fluorescent protein.” Science 333.6042 (2011): 642-646). It has also been suggested that aptamers may be used as components of targeted siRNA therapeutic delivery systems, for example targeting cell surface proteins (Zhou, Jiehua, and John J. Rossi. “Aptamer-targeted cell-specific RNA interference.” Silence 1.1 (2010): 4).

[0507] Accordingly, provided herein is a gRNA modified, e.g., by one or more aptamer(s) designed to improve gRNA delivery, including delivery across the cellular membrane, to intracellular compartments, or into the nucleus. Such a structure can include, either in addition to the one or more aptamer(s) or without such one or more aptamer(s), moiety(ies) so as to render the guide deliverable, inducible or responsive to a selected effector. The invention accordingly comprehends an gRNA that responds to normal or pathological physiological conditions, including without limitation pH, hypoxia, O2 concentration, temperature, protein concentration, enzymatic concentration, lipid structure, light exposure, mechanical disruption (e.g. ultrasound waves), magnetic fields, electric fields, or electromagnetic radiation.

[0508] An aspect of the invention provides non-naturally occurring or engineered composition comprising an escorted guide RNA (egRNA) comprising:

[0509] an RNA guide sequence capable of hybridizing to a target sequence in a genomic locus of interest in a cell; and,

[0510] an escort RNA aptamer sequence, wherein the escort aptamer has binding affinity for an aptamer ligand on or in the cell, or the escort aptamer is responsive to a localized aptamer effector on or in the cell, wherein the presence of the aptamer ligand or effector on or in the cell is spatially or temporally restricted.

[0511] The escort aptamer may for example change conformation in response to an interaction with the aptamer ligand or effector in the cell.

[0512] The escort aptamer may have specific binding affinity for the aptamer ligand.

[0513] The aptamer ligand may be localized in a location or compartment of the cell, for example on or in a membrane of the cell. Binding of the escort aptamer to the aptamer ligand may accordingly direct the egRNA to a location of interest in the cell, such as the interior of the cell by way of binding to an aptamer ligand that is a cell surface ligand. In this way, a variety of spatially restricted locations within the cell may be targeted, such as the cell nucleus or mitochondria.

[0514] Once intended alterations have been introduced, such as by editing intended copies of a gene in the genome of a cell, continued CRISPR/Cas13 expression in that cell is no longer necessary. Indeed, sustained expression would be undesirable in certain casein case of off-target effects at unintended genomic sites, etc. Thus time-limited expression would be useful. Inducible expression offers one approach, but in addition Applicants have engineered a Self-Inactivating Cas13 CRISPR-Cas system that relies on the use of a non-coding guide target sequence within the CRISPR vector itself. Thus, after expression begins, the CRISPR system will lead to its own destruction, but before destruction is complete it will have time to edit the genomic copies of the target gene (which, with a normal point mutation in a diploid cell, requires at most two edits). Simply, the self inactivating Cas13 CRISPR-Cas system includes additional RNA (i.e., guide RNA) that targets the coding sequence for the CRISPR enzyme itself or that targets one or more non-coding guide target sequences complementary to unique sequences present in one or more of the following: (a) within the promoter driving expression of the non-coding RNA elements, (b) within the promoter driving expression of the Cas13 gene, (c) within 100 bp of the ATG translational start codon in the Cas13 coding sequence, (d) within the inverted terminal repeat (iTR) of a viral delivery vector, e.g., in an AAV genome.

[0515] The egRNA may include an RNA aptamer linking sequence, operably linking the escort RNA sequence to the RNA guide sequence.

[0516] In embodiments, the egRNA may include one or more photolabile bonds or non-naturally occurring residues.

[0517] In one aspect, the escort RNA aptamer sequence may be complementary to a target miRNA, which may or may not be present within a cell, so that only when the target miRNA is present is there binding of the escort RNA aptamer sequence to the target miRNA which results in cleavage of the egRNA by an RNA-induced silencing complex (RISC) within the cell.

[0518] In embodiments, the escort RNA aptamer sequence may for example be from 10 to 200 nucleotides in length, and the egRNA may include more than one escort RNA aptamer sequence.

[0519] It is to be understood that any of the RNA guide sequences as described herein elsewhere can be used in the egRNA described herein. In certain embodiments of the invention, the guide RNA or mature crRNA comprises, consists essentially of, or consists of a direct repeat sequence and a guide sequence or spacer sequence. In certain embodiments, the guide RNA or mature crRNA comprises, consists essentially of, or consists of a direct repeat sequence linked to a guide sequence or spacer sequence. In certain embodiments the guide RNA or mature crRNA comprises 19 nts of partial direct repeat followed by 23-25 nt of guide sequence or spacer sequence. In certain embodiments, the effector protein is a FnCas13 effector protein and requires at least 16 nt of guide sequence to achieve detectable DNA cleavage and a minimum of 17 nt of guide sequence to achieve efficient DNA cleavage in vitro. In certain embodiments, the direct repeat sequence is located upstream (i.e., 5′) from the guide sequence or spacer sequence. In a preferred embodiment the seed sequence (i.e. the sequence essential critical for recognition and/or hybridization to the sequence at the target locus) of the FnCas13 guide RNA is approximately within the first 5 nt on the 5′ end of the guide sequence or spacer sequence.

[0520] The egRNA may be included in a non-naturally occurring or engineered Cas13 CRISPR-Cas complex composition, together with a Cas13 which may include at least one mutation, for example a mutation so that the Cas13 has no more than 5% of the nuclease activity of a Cas13 not having the at least one mutation, for example having a diminished nuclease activity of at least 97%, or 100% as compared with the Cas13 not having the at least one mutation. The Cas13 may also include one or more nuclear localization sequences. Mutated Cas13 enzymes having modulated activity such as diminished nuclease activity are described herein elsewhere.

[0521] The engineered Cas13 CRISPR-Cas composition may be provided in a cell, such as a eukaryotic cell, a mammalian cell, or a human cell.

[0522] In embodiments, the compositions described herein comprise a Cas13 CRISPR-Cas complex having at least three functional domains, at least one of which is associated with Cas13 and at least two of which are associated with egRNA.

[0523] The compositions described herein may be used to introduce a genomic locus event in a host cell, such as a eukaryotic cell, in particular a mammalian cell, or a non-human eukaryote, in particular a non-human mammal such as a mouse, in vivo. The genomic locus event may comprise affecting gene activation, gene inhibition, or cleavage in a locus. The compositions described herein may also be used to modify a genomic locus of interest to change gene expression in a cell. Methods of introducing a genomic locus event in a host cell using the Cas13 enzyme provided herein are described herein in detail elsewhere. Delivery of the composition may for example be by way of delivery of a nucleic acid molecule(s) coding for the composition, which nucleic acid molecule(s) is operatively linked to regulatory sequence(s), and expression of the nucleic acid molecule(s) in vivo, for example by way of a lentivirus, an adenovirus, or an AAV.

[0524] The present invention provides compositions and methods by which gRNA-mediated gene editing activity can be adapted. The invention provides gRNA secondary structures that improve cutting efficiency by increasing gRNA and/or increasing the amount of RNA delivered into the cell. The gRNA may include light labile or inducible nucleotides.

[0525] To increase the effectiveness of gRNA, for example gRNA delivered with viral or non-viral technologies, Applicants added secondary structures into the gRNA that enhance its stability and improve gene editing. Separately, to overcome the lack of effective delivery, Applicants modified gRNAs with cell penetrating RNA aptamers; the aptamers bind to cell surface receptors and promote the entry of gRNAs into cells. Notably, the cell-penetrating aptamers can be designed to target specific cell receptors, in order to mediate cell-specific delivery. Applicants also have created guides that are inducible.

[0526] Light responsiveness of an inducible system may be achieved via the activation and binding of cryptochrome-2 and CIB1. Blue light stimulation induces an activating conformational change in cryptochrome-2, resulting in recruitment of its binding partner CIB1. This binding is fast and reversible, achieving saturation in <15 sec following pulsed stimulation and returning to baseline <15 min after the end of stimulation. These rapid binding kinetics result in a system temporally bound only by the speed of transcription/translation and transcript/protein degradation, rather than uptake and clearance of inducing agents. Crytochrome-2 activation is also highly sensitive, allowing for the use of low light intensity stimulation and mitigating the risks of phototoxicity. Further, in a context such as the intact mammalian brain, variable light intensity may be used to control the size of a stimulated region, allowing for greater precision than vector delivery alone may offer.

[0527] The invention contemplates energy sources such as electromagnetic radiation, sound energy or thermal energy to induce the guide. Advantageously, the electromagnetic radiation is a component of visible light. In a preferred embodiment, the light is a blue light with a wavelength of about 450 to about 495 nm. In an especially preferred embodiment, the wavelength is about 488 nm. In another preferred embodiment, the light stimulation is via pulses. The light power may range from about 0-9 mW/cm2. In a preferred embodiment, a stimulation paradigm of as low as 0.25 sec every 15 sec should result in maximal activation.

[0528] Cells involved in the practice of the present invention may be a prokaryotic cell or a eukaryotic cell, advantageously an animal cell a plant cell or a yeast cell, more advantageously a mammalian cell.

[0529] The chemical or energy sensitive guide may undergo a conformational change upon induction by the binding of a chemical source or by the energy allowing it act as a guide and have the Cas13 CRISPR-Cas system or complex function. The invention can involve applying the chemical source or energy so as to have the guide function and the Cas13 CRISPR-Cas system or complex function; and optionally further determining that the expression of the genomic locus is altered.

[0530] There are several different designs of this chemical inducible system: 1. ABI-PYL based system inducible by Abscisic Acid (ABA) (see, e.g., http://stke.sciencemag.org/cgi/content/abstract/sigtrans; 4/164/rs2), 2. FKBP-FRB based system inducible by rapamycin (or related chemicals based on rapamycin) (see, e.g., http://www.nature.com/nmeth/journal/v2/n6/full/nmeth763.html), 3. GID1-GAI based system inducible by Gibberellin (GA) (see, e.g., http://www.nature.com/nchembio/journal/v8/n5/full/nchembio.922.html).

[0531] Another system contemplated by the present invention is a chemical inducible system based on change in sub-cellular localization. Applicants also developed a system in which the polypeptide include a DNA binding domain comprising at least five or more Transcription activator-like effector (TALE) monomers and at least one or more half-monomers specifically ordered to target the genomic locus of interest linked to at least one or more effector domains are further linker to a chemical or energy sensitive protein. This protein will lead to a change in the sub-cellular localization of the entire polypeptide (i.e. transportation of the entire polypeptide from cytoplasm into the nucleus of the cells) upon the binding of a chemical or energy transfer to the chemical or energy sensitive protein. This transportation of the entire polypeptide from one sub-cellular compartments or organelles, in which its activity is sequestered due to lack of substrate for the effector domain, into another one in which the substrate is present would allow the entire polypeptide to come in contact with its desired substrate (i.e. genomic DNA in the mammalian nucleus) and result in activation or repression of target gene expression.

[0532] This type of system could also be used to induce the cleavage of a genomic locus of interest in a cell when the effector domain is a nuclease.

[0533] A chemical inducible system can be an estrogen receptor (ER) based system inducible by 4-hydroxytamoxifen (40HT) (see, e.g., http://www.pnas.org/content/104/3/1027.abstract). A mutated ligand-binding domain of the estrogen receptor called ERT2 translocates into the nucleus of cells upon binding of 4-hydroxytamoxifen. In further embodiments of the invention any naturally occurring or engineered derivative of any nuclear receptor, thyroid hormone receptor, retinoic acid receptor, estrogen receptor, estrogen-related receptor, glucocorticoid receptor, progesterone receptor, androgen receptor may be used in inducible systems analogous to the ER based inducible system.

[0534] Another inducible system is based on the design using Transient receptor potential (TRP) ion channel based system inducible by energy, heat or radio-wave (see, e.g., http://www.sciencemag.org/content/336/6081/604). These TRP family proteins respond to different stimuli, including light and heat. When this protein is activated by light or heat, the ion channel will open and allow the entering of ions such as calcium into the plasma membrane. This influx of ions will bind to intracellular ion interacting partners linked to a polypeptide including the guide and the other components of the Cas13 CRISPR-Cas complex or system, and the binding will induce the change of sub-cellular localization of the polypeptide, leading to the entire polypeptide entering the nucleus of cells. Once inside the nucleus, the guide protein and the other components of the Cas13 CRISPR-Cas complex will be active and modulating target gene expression in cells.

[0535] This type of system could also be used to induce the cleavage of a genomic locus of interest in a cell; and, in this regard, it is noted that the Cas13 enzyme is a nuclease. The light could be generated with a laser or other forms of energy sources. The heat could be generated by raise of temperature results from an energy source, or from nano-particles that release heat after absorbing energy from an energy source delivered in the form of radio-wave.

[0536] While light activation may be an advantageous embodiment, sometimes it may be disadvantageous especially for in vivo applications in which the light may not penetrate the skin or other organs. In this instance, other methods of energy activation are contemplated, in particular, electric field energy and/or ultrasound which have a similar effect.

[0537] Electric field energy is preferably administered substantially as described in the art, using one or more electric pulses of from about 1 Volt/cm to about 10 kVolts/cm under in vivo conditions. Instead of or in addition to the pulses, the electric field may be delivered in a continuous manner. The electric pulse may be applied for between 1 ¬μs and 500 milliseconds, preferably between 1 ¬μs and 100 milliseconds. The electric field may be applied continuously or in a pulsed manner for 5 about minutes.

[0538] As used herein, ‘electric field energy’ is the electrical energy to which a cell is exposed. Preferably the electric field has a strength of from about 1 Volt/cm to about 10 kVolts/cm or more under in vivo conditions (see WO97/49450).

[0539] As used herein, the term “electric field” includes one or more pulses at variable capacitance and voltage and including exponential and/or square wave and/or modulated wave and/or modulated square wave forms. References to electric fields and electricity should be taken to include reference the presence of an electric potential difference in the environment of a cell. Such an environment may be set up by way of static electricity, alternating current (AC), direct current (DC), etc, as known in the art. The electric field may be uniform, non-uniform or otherwise, and may vary in strength and/or direction in a time dependent manner.

[0540] Single or multiple applications of electric field, as well as single or multiple applications of ultrasound are also possible, in any order and in any combination. The ultrasound and/or the electric field may be delivered as single or multiple continuous applications, or as pulses (pulsatile delivery).

[0541] Electroporation has been used in both in vitro and in vivo procedures to introduce foreign material into living cells. With in vitro applications, a sample of live cells is first mixed with the agent of interest and placed between electrodes such as parallel plates. Then, the electrodes apply an electrical field to the cell/implant mixture. Examples of systems that perform in vitro electroporation include the Electro Cell Manipulator ECM600 product, and the Electro Square Porator T820, both made by the BTX Division of Genetronics, Inc (see U.S. Pat. No. 5,869,326).

[0542] The known electroporation techniques (both in vitro and in vivo) function by applying a brief high voltage pulse to electrodes positioned around the treatment region. The electric field generated between the electrodes causes the cell membranes to temporarily become porous, whereupon molecules of the agent of interest enter the cells. In known electroporation applications, this electric field comprises a single square wave pulse on the order of 1000 V/cm, of about 100.mu.s duration. Such a pulse may be generated, for example, in known applications of the Electro Square Porator T820.

[0543] Preferably, the electric field has a strength of from about 1 V/cm to about 10 kV/cm under in vitro conditions. Thus, the electric field may have a strength of 1 V/cm, 2 V/cm, 3 V/cm, 4 V/cm, 5 V/cm, 6 V/cm, 7 V/cm, 8 V/cm, 9 V/cm, 10 V/cm, 20 V/cm, 50 V/cm, 100 V/cm, 200 V/cm, 300 V/cm, 400 V/cm, 500 V/cm, 600 V/cm, 700 V/cm, 800 V/cm, 900 V/cm, 1 kV/cm, 2 kV/cm, 5 kV/cm, 10 kV/cm, 20 kV/cm, 50 kV/cm or more. More preferably from about 0.5 kV/cm to about 4.0 kV/cm under in vitro conditions. Preferably the electric field has a strength of from about 1 V/cm to about 10 kV/cm under in vivo conditions. However, the electric field strengths may be lowered where the number of pulses delivered to the target site are increased. Thus, pulsatile delivery of electric fields at lower field strengths is envisaged.

[0544] Preferably the application of the electric field is in the form of multiple pulses such as double pulses of the same strength and capacitance or sequential pulses of varying strength and/or capacitance. As used herein, the term “pulse” includes one or more electric pulses at variable capacitance and voltage and including exponential and/or square wave and/or modulated wave/square wave forms.

[0545] Preferably the electric pulse is delivered as a waveform selected from an exponential wave form, a square wave form, a modulated wave form and a modulated square wave form.

[0546] A preferred embodiment employs direct current at low voltage. Thus, Applicants disclose the use of an electric field which is applied to the cell, tissue or tissue mass at a field strength of between 1V/cm and 20V/cm, for a period of 100 milliseconds or more, preferably 15 minutes or more.

[0547] Ultrasound is advantageously administered at a power level of from about 0.05 W/cm2 to about 100 W/cm2. Diagnostic or therapeutic ultrasound may be used, or combinations thereof.

[0548] As used herein, the term “ultrasound” refers to a form of energy which consists of mechanical vibrations the frequencies of which are so high they are above the range of human hearing. Lower frequency limit of the ultrasonic spectrum may generally be taken as about 20 kHz. Most diagnostic applications of ultrasound employ frequencies in the range 1 and 15 MHz' (From Ultrasonics in Clinical Diagnosis, P. N. T. Wells, ed., 2nd. Edition, Publ. Churchill Livingstone [Edinburgh, London & NY, 1977]).

[0549] Ultrasound has been used in both diagnostic and therapeutic applications. When used as a diagnostic tool (“diagnostic ultrasound”), ultrasound is typically used in an energy density range of up to about 100 mW/cm2 (FDA recommendation), although energy densities of up to 750 mW/cm2 have been used. In physiotherapy, ultrasound is typically used as an energy source in a range up to about 3 to 4 W/cm2 (WHO recommendation). In other therapeutic applications, higher intensities of ultrasound may be employed, for example, HIFU at 100 W/cm up to 1 kW/cm2 (or even higher) for short periods of time. The term “ultrasound” as used in this specification is intended to encompass diagnostic, therapeutic and focused ultrasound.

[0550] Focused ultrasound (FUS) allows thermal energy to be delivered without an invasive probe (see Morocz et al 1998 Journal of Magnetic Resonance Imaging Vol. 8, No. 1, pp. 136-142. Another form of focused ultrasound is high intensity focused ultrasound (HIFU) which is reviewed by Moussatov et al in Ultrasonics (1998) Vol. 36, No. 8, pp. 893-900 and TranHuuHue et al in Acustica (1997) Vol. 83, No. 6, pp. 1103-1106.

[0551] Preferably, a combination of diagnostic ultrasound and a therapeutic ultrasound is employed. This combination is not intended to be limiting, however, and the skilled reader will appreciate that any variety of combinations of ultrasound may be used. Additionally, the energy density, frequency of ultrasound, and period of exposure may be varied.

[0552] Preferably the exposure to an ultrasound energy source is at a power density of from about 0.05 to about 100 Wcm−2. Even more preferably, the exposure to an ultrasound energy source is at a power density of from about 1 to about 15 Wcm−2.

[0553] Preferably the exposure to an ultrasound energy source is at a frequency of from about 0.015 to about 10.0 MHz. More preferably the exposure to an ultrasound energy source is at a frequency of from about 0.02 to about 5.0 MHz or about 6.0 MHz. Most preferably, the ultrasound is applied at a frequency of 3 MHz.

[0554] Preferably the exposure is for periods of from about 10 milliseconds to about 60 minutes. Preferably the exposure is for periods of from about 1 second to about 5 minutes. More preferably, the ultrasound is applied for about 2 minutes. Depending on the particular target cell to be disrupted, however, the exposure may be for a longer duration, for example, for 15 minutes.

[0555] Advantageously, the target tissue is exposed to an ultrasound energy source at an acoustic power density of from about 0.05 Wcm−2 to about 10 Wcm−2 with a frequency ranging from about 0.015 to about 10 MHz (see WO 98/52609). However, alternatives are also possible, for example, exposure to an ultrasound energy source at an acoustic power density of above 100 Wcm−2, but for reduced periods of time, for example, 1000 Wcm−2 for periods in the millisecond range or less.

[0556] Preferably the application of the ultrasound is in the form of multiple pulses; thus, both continuous wave and pulsed wave (pulsatile delivery of ultrasound) may be employed in any combination. For example, continuous wave ultrasound may be applied, followed by pulsed wave ultrasound, or vice versa. This may be repeated any number of times, in any order and combination. The pulsed wave ultrasound may be applied against a background of continuous wave ultrasound, and any number of pulses may be used in any number of groups.

[0557] Preferably, the ultrasound may comprise pulsed wave ultrasound. In a highly preferred embodiment, the ultrasound is applied at a power density of 0.7 Wcm−2 or 1.25 Wcm−2 as a continuous wave. Higher power densities may be employed if pulsed wave ultrasound is used.

[0558] Use of ultrasound is advantageous as, like light, it may be focused accurately on a target. Moreover, ultrasound is advantageous as it may be focused more deeply into tissues unlike light. It is therefore better suited to whole-tissue penetration (such as but not limited to a lobe of the liver) or whole organ (such as but not limited to the entire liver or an entire muscle, such as the heart) therapy. Another important advantage is that ultrasound is a non-invasive stimulus which is used in a wide variety of diagnostic and therapeutic applications. By way of example, ultrasound is well known in medical imaging techniques and, additionally, in orthopedic therapy. Furthermore, instruments suitable for the application of ultrasound to a subject vertebrate are widely available and their use is well known in the art.

[0559] The rapid transcriptional response and endogenous targeting of the instant invention make for an ideal system for the study of transcriptional dynamics. For example, the instant invention may be used to study the dynamics of variant production upon induced expression of a target gene. On the other end of the transcription cycle, mRNA degradation studies are often performed in response to a strong extracellular stimulus, causing expression level changes in a plethora of genes. The instant invention may be utilized to reversibly induce transcription of an endogenous target, after which point stimulation may be stopped and the degradation kinetics of the unique target may be tracked.

[0560] The temporal precision of the instant invention may provide the power to time genetic regulation in concert with experimental interventions. For example, targets with suspected involvement in long-term potentiation (LTP) may be modulated in organotypic or dissociated neuronal cultures, but only during stimulus to induce LTP, so as to avoid interfering with the normal development of the cells. Similarly, in cellular models exhibiting disease phenotypes, targets suspected to be involved in the effectiveness of a particular therapy may be modulated only during treatment. Conversely, genetic targets may be modulated only during a pathological stimulus. Any number of experiments in which timing of genetic cues to external experimental stimuli is of relevance may potentially benefit from the utility of the instant invention.

[0561] The in vivo context offers equally rich opportunities for the instant invention to control gene expression. Photoinducibility provides the potential for spatial precision. Taking advantage of the development of optrode technology, a stimulating fiber optic lead may be placed in a precise brain region. Stimulation region size may then be tuned by light intensity. This may be done in conjunction with the delivery of the Cas13 CRISPR-Cas system or complex of the invention, or, in the case of transgenic Cas13 animals, guide RNA of the invention may be delivered and the optrode technology can allow for the modulation of gene expression in precise brain regions. A transparent Cas13 expressing organism, can have guide RNA of the invention administered to it and then there can be extremely precise laser induced local gene expression changes.

[0562] A culture medium for culturing host cells includes a medium commonly used for tissue culture, such as M199-earle base, Eagle MEM (E-MEM), Dulbecco MEM (DMEM), SC-UCM102, UP-SFM (GIBCO BRL), EX-CELL302 (Nichirei), EX-CELL293-S(Nichirei), TFBM-01 (Nichirei), ASF104, among others. Suitable culture media for specific cell types may be found at the American Type Culture Collection (ATCC) or the European Collection of Cell Cultures (ECACC). Culture media may be supplemented with amino acids such as L-glutamine, salts, anti-fungal or anti-bacterial agents such as Fungizone¬Æ, penicillin-streptomycin, animal serum, and the like. The cell culture medium may optionally be serum-free.

[0563] The invention may also offer valuable temporal precision in vivo. The invention may be used to alter gene expression during a particular stage of development. The invention may be used to time a genetic cue to a particular experimental window. For example, genes implicated in learning may be overexpressed or repressed only during the learning stimulus in a precise region of the intact rodent or primate brain. Further, the invention may be used to induce gene expression changes only during particular stages of disease development. For example, an oncogene may be overexpressed only once a tumor reaches a particular size or metastatic stage. Conversely, proteins suspected in the development of Alzheimer's may be knocked down only at defined time points in the animal's life and within a particular brain region. Although these examples do not exhaustively list the potential applications of the invention, they highlight some of the areas in which the invention may be a powerful technology.

Protected Guides: Enzymes According to the Invention can be Used in Combination with Protected Guide RNAs

[0564] In one aspect, an object of the current invention is to further enhance the specificity of Cas13 given individual guide RNAs through thermodynamic tuning of the binding specificity of the guide RNA to target DNA. This is a general approach of introducing mismatches, elongation or truncation of the guide sequence to increase/decrease the number of complimentary bases vs. mismatched bases shared between a genomic target and its potential off-target loci, in order to give thermodynamic advantage to targeted genomic loci over genomic off-targets.

[0565] In one aspect, the invention provides for the guide sequence being modified by secondary structure to increase the specificity of the Cas13 CRISPR-Cas system and whereby the secondary structure can protect against exonuclease activity and allow for 3′ additions to the guide sequence.

[0566] In one aspect, the invention provides for hybridizing a “protector RNA” to a guide sequence, wherein the “protector RNA” is an RNA strand complementary to the 5′ end of the guide RNA (gRNA), to thereby generate a partially double-stranded gRNA. In an embodiment of the invention, protecting the mismatched bases with a perfectly complementary protector sequence decreases the likelihood of target DNA binding to the mismatched base pairs at the 3′ end. In embodiments of the invention, additional sequences comprising an extended length may also be present.

[0567] Guide RNA (gRNA) extensions matching the genomic target provide gRNA protection and enhance specificity. Extension of the gRNA with matching sequence distal to the end of the spacer seed for individual genomic targets is envisaged to provide enhanced specificity. Matching gRNA extensions that enhance specificity have been observed in cells without truncation. Prediction of gRNA structure accompanying these stable length extensions has shown that stable forms arise from protective states, where the extension forms a closed loop with the gRNA seed due to complimentary sequences in the spacer extension and the spacer seed. These results demonstrate that the protected guide concept also includes sequences matching the genomic target sequence distal of the 20mer spacer-binding region. Thermodynamic prediction can be used to predict completely matching or partially matching guide extensions that result in protected gRNA states. This extends the concept of protected gRNAs to interaction between X and Z, where X will generally be of length 17-20 nt and Z is of length 1-30 nt. Thermodynamic prediction can be used to determine the optimal extension state for Z, potentially introducing small numbers of mismatches in Z to promote the formation of protected conformations between X and Z. Throughout the present application, the terms “X” and seed length (SL) are used interchangeably with the term exposed length (EpL) which denotes the number of nucleotides available for target DNA to bind; the terms “Y” and protector length (PL) are used interchangeably to represent the length of the protector; and the terms “Z”, “E”, “E” and “EL” are used interchangeably to correspond to the term extended length (ExL) which represents the number of nucleotides by which the target sequence is extended.

[0568] An extension sequence which corresponds to the extended length (ExL) may optionally be attached directly to the guide sequence at the 3′ end of the protected guide sequence. The extension sequence may be 2 to 12 nucleotides in length. Preferably ExL may be denoted as 0, 2, 4, 6, 8, 10 or 12 nucleotides in length. In a preferred embodiment the ExL is denoted as 0 or 4 nucleotides in length. In a more preferred embodiment the ExL is 4 nucleotides in length. The extension sequence may or may not be complementary to the target sequence.

[0569] An extension sequence may further optionally be attached directly to the guide sequence at the 5′ end of the protected guide sequence as well as to the 3′ end of a protecting sequence. As a result, the extension sequence serves as a linking sequence between the protected sequence and the protecting sequence. Without wishing to be bound by theory, such a link may position the protecting sequence near the protected sequence for improved binding of the protecting sequence to the protected sequence. It will be understood that the above-described relationship of seed, protector, and extension applies where the distal end (i.e., the targeting end) of the guide is the 5′ end, e.g. a guide that functions is a Cas13 system. In an embodiment wherein the distal end of the guide is the 3′ end, the relationship will be the reverse. In such an embodiment, the invention provides for hybridizing a “protector RNA” to a guide sequence, wherein the “protector RNA” is an RNA strand complementary to the 3′ end of the guide RNA (gRNA), to thereby generate a partially double-stranded gRNA.

[0570] Addition of gRNA mismatches to the distal end of the gRNA can demonstrate enhanced specificity. The introduction of unprotected distal mismatches in Y or extension of the gRNA with distal mismatches (Z) can demonstrate enhanced specificity. This concept as mentioned is tied to X, Y, and Z components used in protected gRNAs. The unprotected mismatch concept may be further generalized to the concepts of X, Y, and Z described for protected guide RNAs.

[0571] Cas13. In one aspect, the invention provides for enhanced Cas13 specificity wherein the double stranded 3′ end of the protected guide RNA (pgRNA) allows for two possible outcomes: (1) the guide RNA-protector RNA to guide RNA-target DNA strand exchange will occur and the guide will fully bind the target, or (2) the guide RNA will fail to fully bind the target and because Cas13 target cleavage is a multiple step kinetic reaction that requires guide RNA:target DNA binding to activate Cas13-catalyzed DSBs, wherein Cas13 cleavage does not occur if the guide RNA does not properly bind. According to particular embodiments, the protected guide RNA improves specificity of target binding as compared to a naturally occurring CRISPR-Cas system. According to particular embodiments the protected modified guide RNA improves stability as compared to a naturally occurring CRISPR-Cas. According to particular embodiments the protector sequence has a length between 3 and 120 nucleotides and comprises 3 or more contiguous nucleotides complementary to another sequence of guide or protector. According to particular embodiments, the protector sequence forms a hairpin. According to particular embodiments the guide RNA further comprises a protected sequence and an exposed sequence. According to particular embodiments the exposed sequence is 1 to 19 nucleotides. More particularly, the exposed sequence is at least 75%, at least 90% or about 100% complementary to the target sequence. According to particular embodiments the guide sequence is at least 90% or about 100% complementary to the protector strand. According to particular embodiments the guide sequence is at least 75%, at least 90% or about 100% complementary to the target sequence. According to particular embodiments, the guide RNA further comprises an extension sequence. More particularly, when the distal end of the guide is the 3′ end, the extension sequence is operably linked to the 3′ end of the protected guide sequence, and optionally directly linked to the 3′ end of the protected guide sequence. According to particular embodiments the extension sequence is 1-12 nucleotides. According to particular embodiments the extension sequence is operably linked to the guide sequence at the 3′ end of the protected guide sequence and the 5′ end of the protector strand and optionally directly linked to the 3′ end of the protected guide sequence and the 53′ end of the protector strand, wherein the extension sequence is a linking sequence between the protected sequence and the protector strand. According to particular embodiments the extension sequence is 100% not complementary to the protector strand, optionally at least 95%, at least 90%, at least 80%, at least 70%, at least 60%, or at least 50% not complementary to the protector strand. According to particular embodiments the guide sequence further comprises mismatches appended to the end of the guide sequence, wherein the mismatches thermodynamically optimize specificity.

[0572] According to the invention, in certain embodiments, guide modifications that impede strand invasion will be desireable. For example, to minimize off-target actifity, in certain embodiments, it will be desireable to design or modify a guide to impede strand invasion at off-target sites. In certain such embodiments, it may be acceptable or useful to design or modify a guide at the expense of on-target binding efficiency. In certain embodiments, guide-target mismatches at the target site may be tolerated that substantially reduce off-target activity.

[0573] In certain embodiments of the invention, it is desirable to adjust the binding characteristics of the protected guide to minimize off-target CRISPR activity. Accordingly, thermodynamic prediction algorithms are used to predict strengths of binding on target and off target. Alternatively or in addition, selection methods are used to reduce or minimize off-target effects, by absolute measures or relative to on-target effects.

[0574] Design options include, without limitation, i) adjusting the length of protector strand that binds to the protected strand, ii) adjusting the length of the portion of the protected strand that is exposed, iii) extending the protected strand with a stem-loop located external (distal) to the protected strand (i.e. designed so that the stem loop is external to the protected strand at the distal end), iv) extending the protected strand by addition of a protector strand to form a stem-loop with all or part of the protected strand, v) adjusting binding of the protector strand to the protected strand by designing in one or more base mismatches and/or one or more non-canonical base pairings, vi) adjusting the location of the stem formed by hybridization of the protector strand to the protected strand, and vii) addition of a non-structured protector to the end of the protected strand.

[0575] In one aspect, the invention provides an engineered, non-naturally occurring CRISPR-Cas system comprising a Cas13 protein and a protected guide RNA that targets a DNA molecule encoding a gene product in a cell, whereby the protected guide RNA targets the DNA molecule encoding the gene product and the Cas13 protein cleaves the DNA molecule encoding the gene product, whereby expression of the gene product is altered; and, wherein the Cas13 protein and the protected guide RNA do not naturally occur together. The invention comprehends the protected guide RNA comprising a guide sequence fused 3′ to a direct repeat sequence. The invention further comprehends the Cas13 CRISPR protein being codon optimized for expression in a eEukaryotic cell. In a preferred embodiment the eEukaryotic cell is a mammalian cell, a plant cell or a yeast cell and in a more preferred embodiment the mammalian cell is a human cell. In a further embodiment of the invention, the expression of the gene product is decreased. In some embodiments the CRISPR protein is Cas13. In some embodiments the CRISPR protein is Cas12a. In some embodiments, the Cas13 or Cas12a enzyme protein is Acidaminococcus sp. BV3L6, Lachnospiraceae bacterium or Francisella Novicida Cas13 or Cas12a, and may include mutated Cas13 or Cas12a derived from these organisms. The enzyme protein may be a further Cas13 or Cas12a homolog or ortholog. In some embodiments, the nucleotide sequence encoding the Cfp1 Csa13 or Cas12a enzyme protein is codon-optimized for expression in a eukaryotic cell. In some embodiments, the Cas13 or Cas12a enzyme protein directs cleavage of one or two strands at the location of the target sequence. In some embodiments, the first regulatory element is a polymerase III promoter. In some embodiments, the second regulatory element is a polymerase II promoter. In general, and throughout this specification, the term “vector” refers to a nucleic acid molecule capable of transporting another nucleic acid to which it has been linked. Vectors include, but are not limited to, nucleic acid molecules that are single-stranded, double-stranded, or partially double-stranded; nucleic acid molecules that comprise one or more free ends, no free ends (e.g., circular); nucleic acid molecules that comprise DNA, RNA, or both; and other varieties of polynucleotides known in the art. One type of vector is a “plasmid,” which refers to a circular double stranded DNA loop into which additional DNA segments can be inserted, such as by standard molecular cloning techniques. Another type of vector is a viral vector, wherein virally-derived DNA or RNA sequences are present in the vector for packaging into a virus (e.g., retroviruses, replication defective retroviruses, adenoviruses, replication defective adenoviruses, and adeno-associated viruses). Viral vectors also include polynucleotides carried by a virus for transfection into a host cell. Certain vectors are capable of autonomous replication in a host cell into which they are introduced (e.g., bacterial vectors having a bacterial origin of replication and episomal mammalian vectors). Other vectors (e.g., non-episomal mammalian vectors) are integrated into the genome of a host cell upon introduction into the host cell, and thereby are replicated along with the host genome. Moreover, certain vectors are capable of directing the expression of genes to which they are operatively-linked. Such vectors are referred to herein as “expression vectors.” Common expression vectors of utility in recombinant DNA techniques are often in the form of plasmids.

[0576] Recombinant expression vectors can comprise a nucleic acid of the invention in a form suitable for expression of the nucleic acid in a host cell, which means that the recombinant expression vectors include one or more regulatory elements, which may be selected on the basis of the host cells to be used for expression, that is operatively-linked to the nucleic acid sequence to be expressed. Within a recombinant expression vector, “operably linked” is intended to mean that the nucleotide sequence of interest is linked to the regulatory element(s) in a manner that allows for expression of the nucleotide sequence (e.g., in an in vitro transcription/translation system or in a host cell when the vector is introduced into the host cell).

[0577] Advantageous vectors include lentiviruses and adeno-associated viruses, and types of such vectors can also be selected for targeting particular types of cells.

[0578] In one aspect, the invention provides a eukaryotic host cell comprising (a) a first regulatory element operably linked to a direct repeat sequence and one or more insertion sites for inserting one or more guide sequences downstream of the direct repeat sequence, wherein when expressed, the guide sequence directs sequence-specific binding of a CRISPR complex to a target sequence in a eukaryotic cell, wherein the CRISPR complex comprises a CRISPR enzyme complexed with the guide RNA comprising the guide sequence that is hybridized to the target sequence and/or (b) a second regulatory element operably linked to an enzyme-coding sequence encoding said Cas13 enzyme comprising a nuclear localization sequence. In some embodiments, the host cell comprises components (a) and (b). In some embodiments, component (a), component (b), or components (a) and (b) are stably integrated into a genome of the host eukaryotic cell. In some embodiments, component (a) further comprises two or more guide sequences operably linked to the first regulatory element, wherein when expressed, each of the two or more guide sequences direct sequence specific binding of a CRISPR complex to a different target sequence in a eukaryotic cell. In some embodiments, the Cas13 enzyme directs cleavage of one or two strands at the location of the target sequence. In some embodiments, the Cas13 enzyme lacks RNA strand cleavage activity. In some embodiments, the first regulatory element is a polymerase III promoter. In some embodiments, the second regulatory element is a polymerase II promoter.

[0579] In an aspect, the invention provides a non-human eukaryotic organism; preferably a multicellular eukaryotic organism, comprising a eukaryotic host cell according to any of the described embodiments. In other aspects, the invention provides a eukaryotic organism; preferably a multicellular eukaryotic organism, comprising a eukaryotic host cell according to any of the described embodiments. The organism in some embodiments of these aspects may be an animal; for example a mammal. Also, the organism may be an arthropod such as an insect. The organism also may be a plant or a yeast. Further, the organism may be a fungus.

[0580] In one aspect, the invention provides a kit comprising one or more of the components described herein above. In some embodiments, the kit comprises a vector system and instructions for using the kit. In some embodiments, the vector system comprises (a) a first regulatory element operably linked to a direct repeat sequence and one or more insertion sites for inserting one or more guide sequences downstream of the direct repeat sequence, wherein when expressed, the guide sequence directs sequence-specific binding of a Cas13 CRISPR complex to a target sequence in a eukaryotic cell, wherein the CRISPR complex comprises a Cas13 enzyme complexed with the protected guide RNA comprising the guide sequence that is hybridized to the target sequence and/or (b) a second regulatory element operably linked to an enzyme-coding sequence encoding said Cas13 enzyme comprising a nuclear localization sequence. In some embodiments, the kit comprises components (a) and (b) located on the same or different vectors of the system. In some embodiments, component (a) further comprises two or more guide sequences operably linked to the first regulatory element, wherein when expressed, each of the two or more guide sequences direct sequence specific binding of a CRISPR complex to a different target sequence in a eukaryotic cell. In some embodiments, the Cas13 enzyme comprises one or more nuclear localization sequences of sufficient strength to drive accumulation of said Cas13 enzyme in a detectable amount in the nucleus of a eukaryotic cell. In some embodiments, the Cas13 enzyme is Acidaminococcus sp. BV3L6, Lachnospiraceae bacterium MA2020 or Francisella tularensis 1 Novicida Cas13, and may include mutated Cas13 derived from these organisms. The enzyme may be a Cas13 homolog or ortholog. In some embodiments, the CRISPR enzyme is codon-optimized for expression in a eukaryotic cell. In some embodiments, the CRISPR enzyme directs cleavage of one or two strands at the location of the target sequence. In some embodiments, the CRISPR enzyme lacks DNA strand cleavage activity. In some embodiments, the first regulatory element is a polymerase III promoter. In some embodiments, the second regulatory element is a polymerase II promoter.

[0581] In one aspect, the invention provides a method of modifying a target polynucleotide in a eukaryotic cell. In some embodiments, the method comprises allowing a CRISPR complex to bind to the target polynucleotide to effect cleavage of said target polynucleotide thereby modifying the target polynucleotide, wherein the CRISPR complex comprises a Cas13 enzyme complexed with protected guide RNA comprising a guide sequence hybridized to a target sequence within said target polynucleotide. In some embodiments, said cleavage comprises cleaving one or two strands at the location of the target sequence by said Cas13 enzyme. In some embodiments, said cleavage results in decreased transcription of a target gene. In some embodiments, the method further comprises repairing said cleaved target polynucleotide by non-homologous end joining (NHEJ)-based gene insertion mechanisms, more particularly with an exogenous template polynucleotide, wherein said repair results in a mutation comprising an insertion, deletion, or substitution of one or more nucleotides of said target polynucleotide. In some embodiments, said mutation results in one or more amino acid changes in a protein expressed from a gene comprising the target sequence. In some embodiments, the method further comprises delivering one or more vectors to said eukaryotic cell, wherein the one or more vectors drive expression of one or more of: the Cas13 enzyme, the protected guide RNA comprising the guide sequence linked to direct repeat sequence. In some embodiments, said vectors are delivered to the eukaryotic cell in a subject. In some embodiments, said modifying takes place in said eukaryotic cell in a cell culture. In some embodiments, the method further comprises isolating said eukaryotic cell from a subject prior to said modifying. In some embodiments, the method further comprises returning said eukaryotic cell and/or cells derived therefrom to said subject.

[0582] In one aspect, the invention provides a method of modifying expression of a polynucleotide in a eukaryotic cell. In some embodiments, the method comprises allowing a Cas13 CRISPR complex to bind to the polynucleotide such that said binding results in increased or decreased expression of said polynucleotide; wherein the CRISPR complex comprises a Cas13 enzyme complexed with a protected guide RNA comprising a guide sequence hybridized to a target sequence within said polynucleotide. In some embodiments, the method further comprises delivering one or more vectors to said eukaryotic cells, wherein the one or more vectors drive expression of one or more of: the Cas13 enzyme and the protected guide RNA.

[0583] In one aspect, the invention provides a method of generating a model eukaryotic cell comprising a mutated disease gene. In some embodiments, a disease gene is any gene associated an increase in the risk of having or developing a disease. In some embodiments, the method comprises (a) introducing one or more vectors into a eukaryotic cell, wherein the one or more vectors drive expression of one or more of: a Cas13 enzyme and a protected guide RNA comprising a guide sequence linked to a direct repeat sequence; and (b) allowing a CRISPR complex to bind to a target polynucleotide to effect cleavage of the target polynucleotide within said disease gene, wherein the CRISPR complex comprises the Cas13 enzyme complexed with the guide RNA comprising the sequence that is hybridized to the target sequence within the target polynucleotide, thereby generating a model eukaryotic cell comprising a mutated disease gene. In some embodiments, said cleavage comprises cleaving one or two strands at the location of the target sequence by said Cas13 enzyme. In some embodiments, said cleavage results in decreased transcription of a target gene. In some embodiments, the method further comprises repairing said cleaved target polynucleotide by non-homologous end joining (NHEJ)-based gene insertion mechanisms with an exogenous template polynucleotide, wherein said repair results in a mutation comprising an insertion, deletion, or substitution of one or more nucleotides of said target polynucleotide. In some embodiments, said mutation results in one or more amino acid changes in a protein expression from a gene comprising the target sequence.

[0584] In one aspect, the invention provides a method for developing a biologically active agent that modulates a cell signaling event associated with a disease gene. In some embodiments, a disease gene is any gene associated an increase in the risk of having or developing a disease. In some embodiments, the method comprises (a) contacting a test compound with a model cell of any one of the described embodiments; and (b) detecting a change in a readout that is indicative of a reduction or an augmentation of a cell signaling event associated with said mutation in said disease gene, thereby developing said biologically active agent that modulates said cell signaling event associated with said disease gene.

[0585] In one aspect, the invention provides a recombinant polynucleotide comprising a protected guide sequence downstream of a direct repeat sequence, wherein the protected guide sequence when expressed directs sequence-specific binding of a CRISPR complex to a corresponding target sequence present in a eukaryotic cell. In some embodiments, the target sequence is a viral sequence present in a eukaryotic cell. In some embodiments, the target sequence is a proto-oncogene or an oncogene.

[0586] In one aspect the invention provides for a method of selecting one or more cell(s) by introducing one or more mutations in a gene in the one or more cell (s), the method comprising: introducing one or more vectors into the cell (s), wherein the one or more vectors drive expression of one or more of: a Cas13 enzyme, a protected guide RNA comprising a guide sequence, and an editing template; wherein the editing template comprises the one or more mutations that abolish Cas13 enzyme cleavage; allowing non-homologous end joining (NHEJ)-based gene insertion mechanisms of the editing template with the target polynucleotide in the cell(s) to be selected; allowing a CRISPR complex to bind to a target polynucleotide to effect cleavage of the target polynucleotide within said gene, wherein the CRISPR complex comprises the Cas13 enzyme complexed with the protected guide RNA comprising a guide sequence that is hybridized to the target sequence within the target polynucleotide, wherein binding of the CRISPR complex to the target polynucleotide induces cell death, thereby allowing one or more cell(s) in which one or more mutations have been introduced to be selected. In a preferred embodiment of the invention the cell to be selected may be a eukaryotic cell. Aspects of the invention allow for selection of specific cells without requiring a selection marker or a two-step process that may include a counter-selection system.

[0587] With respect to mutations of the Cas13 enzyme, when the enzyme is not FnCas13, mutations may be as described herein elsewhere; conservative substitution for any of the replacement amino acids is also envisaged. In an aspect the invention provides as to any or each or all embodiments herein-discussed wherein the CRISPR enzyme comprises at least one or more, or at least two or more mutations, wherein the at least one or more mutation or the at least two or more mutations are selected from those described herein elsewhere.

[0588] In a further aspect, the invention involves a computer-assisted method for identifying or designing potential compounds to fit within or bind to CRISPR-Cas13 system or a functional portion thereof or vice versa (a computer-assisted method for identifying or designing potential CRISPR-Cas13 systems or a functional portion thereof for binding to desired compounds) or a computer-assisted method for identifying or designing potential CRISPR-Cas13 systems (e.g., with regard to predicting areas of the CRISPR-Cas13 system to be able to be manipulated—for instance, based on crystal structure data or based on data of Cas13 orthologs, or with respect to where a functional group such as an activator or repressor can be attached to the CRISPR-Cas13 system, or as to Cas13 truncations or as to designing nickases), said method comprising:

[0589] using a computer system, e.g., a programmed computer comprising a processor, a data storage system, an input device, and an output device, the steps of:

[0590] (a) inputting into the programmed computer through said input device data comprising the three-dimensional co-ordinates of a subset of the atoms from or pertaining to the CRISPR-Cas13 crystal structure, e.g., in the CRISPR-Cas13 system binding domain or alternatively or additionally in domains that vary based on variance among Cas13 orthologs or as to Cas13s or as to nickases or as to functional groups, optionally with structural information from CRISPR-Cas13 system complex(es), thereby generating a data set;

[0591] (b) comparing, using said processor, said data set to a computer database of structures stored in said computer data storage system, e.g., structures of compounds that bind or putatively bind or that are desired to bind to a CRISPR-Cas13 system or as to Cas13 orthologs (e.g., as Cas13s or as to domains or regions that vary amongst Cas13 orthologs) or as to the CRISPR-Cas13 crystal structure or as to nickases or as to functional groups;

[0592] (c) selecting from said database, using computer methods, structure(s)—e.g., CRISPR-Cas13 structures that may bind to desired structures, desired structures that may bind to certain CRISPR-Cas13 structures, portions of the CRISPR-Cas13 system that may be manipulated, e.g., based on data from other portions of the CRISPR-Cas13 crystal structure and/or from Cas13 orthologs, truncated Cas13s, novel nickases or particular functional groups, or positions for attaching functional groups or functional-group-CRISPR-Cas13 systems;

[0593] (d) constructing, using computer methods, a model of the selected structure(s); and

[0594] (e) outputting to said output device the selected structure(s);

and optionally synthesizing one or more of the selected structure(s); and further optionally testing said synthesized selected structure(s) as or in a CRISPR-Cas13 system;

[0595] or, said method comprising: providing the co-ordinates of at least two atoms of the CRISPR-Cas13 crystal structure, e.g., at least two atoms of the herein Crystal Structure Table of the CRISPR-Cas13 crystal structure or co-ordinates of at least a sub-domain of the CRISPR-Cas13 crystal structure (“selected co-ordinates”), providing the structure of a candidate comprising a binding molecule or of portions of the CRISPR-Cas13 system that may be manipulated, e.g., based on data from other portions of the CRISPR-Cas13 crystal structure and/or from Cas13 orthologs, or the structure of functional groups, and fitting the structure of the candidate to the selected co-ordinates, to thereby obtain product data comprising CRISPR-Cas13 structures that may bind to desired structures, desired structures that may bind to certain CRISPR-Cas13 structures, portions of the CRISPR-Cas13 system that may be manipulated, truncated Cas13s, novel nickases, or particular functional groups, or positions for attaching functional groups or functional-group-CRISPR-Cas13 systems, with output thereof, and optionally synthesizing compound(s) from said product data and further optionally comprising testing said synthesized compound(s) as or in a CRISPR-Cas13 system.

[0596] The testing can comprise analyzing the CRISPR-Cas13 system resulting from said synthesized selected structure(s), e.g., with respect to binding, or performing a desired function.

[0597] The output in the foregoing methods can comprise data transmission, e.g., transmission of information via telecommunication, telephone, video conference, mass communication, e.g., presentation such as a computer presentation (e.g. POWERPOINT), internet, email, documentary communication such as a computer program (e.g. WORD) document and the like. Accordingly, the invention also comprehends computer readable media containing: atomic co-ordinate data according to the herein-referenced Crystal Structure, said data defining the three dimensional structure of CRISPR-Cas13 or at least one sub-domain thereof, or structure factor data for CRISPR-Cas13, said structure factor data being derivable from the atomic co-ordinate data of herein-referenced Crystal Structure. The computer readable media can also contain any data of the foregoing methods. The invention further comprehends methods a computer system for generating or performing rational design as in the foregoing methods containing either: atomic co-ordinate data according to herein-referenced Crystal Structure, said data defining the three dimensional structure of CRISPR-Cas13 or at least one sub-domain thereof, or structure factor data for CRISPR-Cas13, said structure factor data being derivable from the atomic co-ordinate data of herein-referenced Crystal Structure. The invention further comprehends a method of doing business comprising providing to a user the computer system or the media or the three dimensional structure of CRISPR-Cas13 or at least one sub-domain thereof, or structure factor data for CRISPR-Cas13, said structure set forth in and said structure factor data being derivable from the atomic co-ordinate data of herein-referenced Crystal Structure, or the herein computer media or a herein data transmission.

[0598] A “binding site” or an “active site” comprises or consists essentially of or consists of a site (such as an atom, a functional group of an amino acid residue or a plurality of such atoms and/or groups) in a binding cavity or region, which may bind to a compound such as a nucleic acid molecule, which is/are involved in binding.

[0599] By “fitting”, is meant determining by automatic, or semi-automatic means, interactions between one or more atoms of a candidate molecule and at least one atom of a structure of the invention, and calculating the extent to which such interactions are stable. Interactions include attraction and repulsion, brought about by charge, steric considerations and the like. Various computer-based methods for fitting are described further

[0600] By “root mean square (or rms) deviation”, we mean the square root of the arithmetic mean of the squares of the deviations from the mean.

[0601] By a “computer system”, is meant the hardware means, software means and data storage means used to analyze atomic coordinate data. The minimum hardware means of the computer-based systems of the present invention typically comprises a central processing unit (CPU), input means, output means and data storage means. Desirably a display or monitor is provided to visualize structure data. The data storage means may be RAM or means for accessing computer readable media of the invention. Examples of such systems are computer and tablet devices running Unix, Windows or Apple operating systems.

[0602] By “computer readable media”, is meant any medium or media, which can be read and accessed directly or indirectly by a computer e.g., so that the media is suitable for use in the above-mentioned computer system. Such media include, but are not limited to: magnetic storage media such as floppy discs, hard disc storage medium and magnetic tape; optical storage media such as optical discs or CD-ROM; electrical storage media such as RAM and ROM; thumb drive devices; cloud storage devices and hybrids of these categories such as magnetic/optical storage media.

[0603] The invention comprehends the use of the protected guides described herein above in the optimized functional CRISPR-Cas enzyme systems described herein.

[0604] In some embodiments, the guide RNA is a toehold based guide RNA. The toehold based guide RNAs allows for guide RNAs only becoming activated based on the RNA levels of other transcripts in a cell. In certain embodiments, the guide RNA has an extension that includes a loop and a complementary sequence that fold over onto the guide and block the guide. The loop can be complementary to transcripts or miRNA in the cell and bind these transcripts if present. This will unfold the guide RNA allowing it to bind a Cas13 molecule. This bound complex can then knockdown transcripts or edit transcripts depending on the application.

[0605] CRISPR-Cas Enzyme

[0606] In its unmodified form, a CRISPR-Cas protein is a catalytically active protein. This implies that upon formation of a nucleic acid-targeting complex (comprising a guide RNA hybridized to a target sequence one or both DNA strands in or near (e.g., within 1, 2, 3, 4, 5, 6, 7, 8, 9, 10, 20, 50, or more base pairs from) the target sequence is modified (e.g. cleaved). As used herein the term “sequence(s) associated with a target locus of interest” refers to sequences near the vicinity of the target sequence (e.g. within 1, 2, 3, 4, 5, 6, 7, 8, 9, 10, 20, 50, or more base pairs from the target sequence, wherein the target sequence is comprised within a target locus of interest). The unmodified catalytically active Cas13 protein generates a staggered cut, whereby the cut sites are typically within the target sequence. More particularly, the staggered cut is typically 13-23 nucleotides distal to the PAM. In particular embodiments, the cut on the non-target strand is 17 nucleotides downstream of the PAM (i.e. between nucleotide 17 and 18 downstream of the PAM), while the cut on the target strand (i.e. strand hybridizing with the guide sequence) occurs a further 4 nucleotides further from the sequence complementary to the PAM (this is 21 nucleotides upstream of the complement of the PAM on the 3′ strand or between nucleotide 21 and 22 upstream of the complement of the PAM).

[0607] In the methods according to the present invention, the CRISPR-Cas protein is preferably mutated with respect to a corresponding wild-type enzyme such that the mutated CRISPR-Cas protein lacks the ability to cleave one or both DNA strands of a target locus containing a target sequence. In particular embodiments, one or more catalytic domains of the Cas13 protein are mutated to produce a mutated Cas protein which cleaves only one DNA strand of a target sequence.

[0608] In particular embodiments, the CRISPR-Cas protein may be mutated with respect to a corresponding wild-type enzyme such that the mutated CRISPR-Cas protein lacks substantially all DNA cleavage activity. In some embodiments, a CRISPR-Cas protein may be considered to substantially lack all DNA and/or RNA cleavage activity when the cleavage activity of the mutated enzyme is about no more than 25%, 10%, 5%, 1%, 0.1%, 0.01%, or less of the nucleic acid cleavage activity of the non-mutated form of the enzyme; an example can be when the nucleic acid cleavage activity of the mutated form is nil or negligible as compared with the non-mutated form.

[0609] In certain embodiments of the methods provided herein the CRISPR-Cas protein is a mutated CRISPR-Cas protein which cleaves only one DNA strand, i.e. a nickase. More particularly, in the context of the present invention, the nickase ensures cleavage within the non-target sequence, i.e. the sequence which is on the opposite DNA strand of the target sequence and which is 3′ of the PAM sequence. By means of further guidance, and without limitation, an arginine-to-alanine substitution (R1226A) in the Nuc domain of Cas13 from Acidaminococcus sp. converts Cas13 from a nuclease that cleaves both strands to a nickase (cleaves a single strand). It will be understood by the skilled person that where the enzyme is not AsCas13, a mutation may be made at a residue in a corresponding position. In particular embodiments, the Cas13 is FnCas13 and the mutation is at the arginine at position R1218. In particular embodiments, the Cas13 is LbCas13 and the mutation is at the arginine at position R1138. In particular embodiments, the Cas13 is MbCas13 and the mutation is at the arginine at position R1293.

[0610] In certain embodiments of the methods provided herein the CRISPR-Cas protein has reduced or no catalytic activity. Where the CRISPR-Cas protein is a Cas13 protein, the mutations may include but are not limited to one or more mutations in the catalytic RuvC-like domain, such as D908A or E993A with reference to the positions in AsCas13.

[0611] In some embodiments, a CRISPR-Cas protein is considered to substantially lack all DNA cleavage activity when the DNA cleavage activity of the mutated enzyme is about no more than 25%, 10%, 5%, 1%, 0.1%, 0.01%, or less of the DNA cleavage activity of the non-mutated form of the enzyme; an example can be when the DNA cleavage activity of the mutated form is nil or negligible as compared with the non-mutated form. In these embodiments, the CRISPR-Cas protein is used as a generic DNA binding protein. The mutations may be artificially introduced mutations or gain- or loss-of-function mutations.

[0612] In addition to the mutations described above, the CRISPR-Cas protein may be additionally modified. As used herein, the term “modified” with regard to a CRISPR-Cas protein generally refers to a CRISPR-Cas protein having one or more modifications or mutations (including point mutations, truncations, insertions, deletions, chimeras, fusion proteins, etc.) compared to the wild type Cas protein from which it is derived. By derived is meant that the derived enzyme is largely based, in the sense of having a high degree of sequence homology with, a wildtype enzyme, but that it has been mutated (modified) in some way as known in the art or as described herein.

[0613] In some embodiments, to reduce the size of a fusion protein of the Cas13b effector and the one or more functional domains, the C-terminus of the Cas13b effector can be truncated while still maintaining its RNA binding function. For example, at least 20 amino acids, at least 50 amino acids, at least 80 amino acids, or at least 100 amino acids, or at least 150 amino acids, or at least 200 amino acids, or at least 250 amino acids, or at least 300 amino acids, or at least 350 amino acids, or up to 120 amino acids, or up to 140 amino acids, or up to 160 amino acids, or up to 180 amino acids, or up to 200 amino acids, or up to 250 amino acids, or up to 300 amino acids, or up to 350 amino acids, or up to 400 amino acids, may be truncated at the C-terminus of the Cas13b effector. Specific examples of Cas13b truncations include C-terminal Δ984-1090, C-terminal Δ1026-1090, and C-terminal AΔ1053-1090, C-terminal Δ934-1090, C-terminal Δ884-1090, C-terminal Δ834-1090, C-terminal Δ784-1090, and C-terminal Δ734-1090, wherein amino acid positions correspond to amino acid positions of Prevotella sp. P5-125 Cas13b protein. See also FIG. 67.

[0614] The additional modifications of the CRISPR-Cas protein may or may not cause an altered functionality. By means of example, and in particular with reference to CRISPR-Cas protein, modifications which do not result in an altered functionality include for instance codon optimization for expression into a particular host, or providing the nuclease with a particular marker (e.g. for visualization). Modifications with may result in altered functionality may also include mutations, including point mutations, insertions, deletions, truncations (including split nucleases), etc. Fusion proteins may without limitation include for instance fusions with heterologous domains or functional domains (e.g. localization signals, catalytic domains, etc.). In certain embodiments, various different modifications may be combined (e.g. a mutated nuclease which is catalytically inactive and which further is fused to a functional domain, such as for instance to induce DNA methylation or another nucleic acid modification, such as including without limitation a break (e.g. by a different nuclease (domain)), a mutation, a deletion, an insertion, a replacement, a ligation, a digestion, a break or a recombination). As used herein, “altered functionality” includes without limitation an altered specificity (e.g. altered target recognition, increased (e.g. “enhanced” Cas proteins) or decreased specificity, or altered PAM recognition), altered activity (e.g. increased or decreased catalytic activity, including catalytically inactive nucleases or nickases), and/or altered stability (e.g. fusions with destalilization domains). Suitable heterologous domains include without limitation a nuclease, a ligase, a repair protein, a methyltransferase, (viral) integrase, a recombinase, a transposase, an argonaute, a cytidine deaminase, a retron, a group II intron, a phosphatase, a phosphorylase, a sulpfurylase, a kinase, a polymerase, an exonuclease, etc. Examples of all these modifications are known in the art. It will be understood that a “modified” nuclease as referred to herein, and in particular a “modified” Cas or “modified” CRISPR-Cas system or complex preferably still has the capacity to interact with or bind to the polynucleic acid (e.g. in complex with theguide molecule). Such modified Cas protein can be combined with the deaminase protein or active domain thereof as described herein.

[0615] In certain embodiments, CRISPR-Cas protein may comprise one or more modifications resulting in enhanced activity and/or specificity, such as including mutating residues that stabilize the targeted or non-targeted strand (e.g. eCas9; “Rationally engineered Cas9 nucleases with improved specificity”, Slaymaker et al. (2016), Science, 351(6268):84-88, incorporated herewith in its entirety by reference). In certain embodiments, the altered or modified activity of the engineered CRISPR protein comprises increased targeting efficiency or decreased off-target binding. In certain embodiments, the altered activity of the engineered CRISPR protein comprises modified cleavage activity. In certain embodiments, the altered activity comprises increased cleavage activity as to the target polynucleotide loci. In certain embodiments, the altered activity comprises decreased cleavage activity as to the target polynucleotide loci. In certain embodiments, the altered activity comprises decreased cleavage activity as to off-target polynucleotide loci. In certain embodiments, the altered or modified activity of the modified nuclease comprises altered helicase kinetics. In certain embodiments, the modified nuclease comprises a modification that alters association of the protein with the nucleic acid molecule comprising RNA (in the case of a Cas protein), or a strand of the target polynucleotide loci, or a strand of off-target polynucleotide loci. In an aspect of the invention, the engineered CRISPR protein comprises a modification that alters formation of the CRISPR complex. In certain embodiments, the altered activity comprises increased cleavage activity as to off-target polynucleotide loci. Accordingly, in certain embodiments, there is increased specificity for target polynucleotide loci as compared to off-target polynucleotide loci. In other embodiments, there is reduced specificity for target polynucleotide loci as compared to off-target polynucleotide loci. In certain embodiments, the mutations result in decreased off-target effects (e.g. cleavage or binding properties, activity, or kinetics), such as in case for Cas proteins for instance resulting in a lower tolerance for mismatches between target and guide RNA. Other mutations may lead to increased off-target effects (e.g. cleavage or binding properties, activity, or kinetics). Other mutations may lead to increased or decreased on-target effects (e.g. cleavage or binding properties, activity, or kinetics). In certain embodiments, the mutations result in altered (e.g. increased or decreased) helicase activity, association or formation of the functional nuclease complex (e.g. CRISPR-Cas complex). In certain embodiments, as described above, the mutations result in an altered PAM recognition, i.e. a different PAM may be (in addition or in the alternative) be recognized, compared to the unmodified Cas protein. Particularly preferred mutations include positively charged residues and/or (evolutionary) conserved residues, such as conserved positively charged residues, in order to enhance specificity. In certain embodiments, such residues may be mutated to uncharged residues, such as alanine.

[0616] In certain embodiments, the methods, products, and uses as described herein can be expanded or adapted to implement any type of CRISPR effector.

[0617] In certain embodiments, the CRISPR effector is a class 2 CRISPR-Cas system effector. It is to be understood that the term “CRISPR effector” preferably refers to an RNA-guided endonuclease. The skilled person will understand that the CRISPR effector may be modified, as described herein elsewhere, and as known in the art. By means of example, and without limitation, CRISPR effector modifications include modifications affecting CRISPR effector functionality or nuclease activity (e.g. catalytically inactive variants (optionally fused or otherwise associated with heterologous functional domains), nickases, altered PAM specificity/recognition, split CRISPR effectors, . . . ), specificity (e.g. enhanced specificity mutants), stability (e.g. destabilized variants), etc.

[0618] In certain embodiments, the CRISPR effector cleaves, binds to, or associates with RNA. In certain embodiments, the CRISPR effector cleaves, binds to, or associates with DNA. In certain embodiments, the CRISPR effector cleaves, binds to, or associates with single stranded RNA. In certain embodiments, the CRISPR effector cleaves, binds to, or associates with single stranded DNA. In certain embodiments, the CRISPR effector cleaves, binds to, or associates with double stranded RNA. In certain embodiments, the CRISPR effector cleaves, binds to, or associates with Double stranded DNA. In certain embodiments, the CRISPR effector cleaves, binds to, or associates with DNA/RNA hybrids.

[0619] In certain embodiments, the CRISPR effector is a class 2, type II CRISPR effector. In certain embodiments, the CRISPR effector is a class 2, type II-A CRISPR effector. In certain embodiments, the CRISPR effector is a class 2, type II-B CRISPR effector. In certain embodiments, the CRISPR effector is a class 2, type II-C CRISPR effector. In certain embodiments, the CRISPR effector is Cas9.

[0620] In certain embodiments, the CRISPR effector is a class 2, type V CRISPR effector. In certain embodiments, the CRISPR effector is a class 2, type V-A CRISPR effector. In certain embodiments, the CRISPR effector is a class 2, type V-B CRISPR effector. In certain embodiments, the CRISPR effector is a class 2, type V-C CRISPR effector. In certain embodiments, the CRISPR effector is Cas12a (Cpf1). In certain embodiments, the CRISPR effector is Cas12b (C2c1). In certain embodiments, the CRISPR effector is Cas12c (C2c3). In certain embodiments, the CRISPR effector is a class 2, type V-U CRISPR effector. In certain embodiments, the CRISPR effector is a class 2, type V-U1 CRISPR effector (e.g. C2c4). In certain embodiments, the CRISPR effector is a class 2, type V-U2 CRISPR effector (e.g. C2c8). In certain embodiments, the CRISPR effector is a class 2, type V-U3 CRISPR effector (e.g. C2c10). In certain embodiments, the CRISPR effector is a class 2, type V-U4 CRISPR effector (e.g. C2c9). In certain embodiments, the CRISPR effector is a class 2, type V-U5 CRISPR effector (e.g. C2c5).

[0621] In certain embodiments, the CRISPR effector is a class 2, type VI CRISPR effector. In certain embodiments, the CRISPR effector is a class 2, type VI-A CRISPR effector. In certain embodiments, the CRISPR effector is a class 2, type VI-B CRISPR effector. In certain embodiments, the CRISPR effector is a class 2, type VI-B1 CRISPR effector. In certain embodiments, the CRISPR effector is a class 2, type VI-B2 CRISPR effector. In certain embodiments, the CRISPR effector is a class 2, type VI-C CRISPR effector. In certain embodiments, the CRISPR effector is Cas13a (C2c2). In certain embodiments, the CRISPR effector is Cas13b (C2c6). In certain embodiments, the CRISPR effector is Cas13c (C2c7).

[0622] In certain embodiments, the CRISPR effector comprises one or more RuvC domain. In certain embodiments, the CRISPR effector comprises a RuvC-I domain. In certain embodiments, the CRISPR effector comprises a RuvC-II domain. In certain embodiments, the CRISPR effector comprises a RuvC-III domain. In certain embodiments, the CRISPR effector comprises a RuvC-I, RuvC-II, and RuvC-III domain. In certain embodiments, one or more of RuvC-I, II, and/or III are contiguous motifs. In certain embodiments, one or more of RuvC-I, II, and/or III are non-contiguous or discrete motifs. In certain embodiments, the CRISPR effector comprises one or more HNH domain. In certain embodiments, the CRISPR effector comprises one or more RuvC domain and one or more HNH domain. In certain embodiments, the CRISPR effector comprises a RuvC-I domain and an HNH domain. In certain embodiments, the CRISPR effector comprises a RuvC-II domain and an HNH domain. In certain embodiments, the CRISPR effector comprises a RuvC-III domain and an HNH domain. In certain embodiments, the CRISPR effector comprises a RuvC-I, RuvC-II, and RuvC-III domain and an HNH domain. In certain embodiments, the CRISPR effector comprises one or more Nuc (nuclease) domain. In certain embodiments, the CRISPR effector comprises one or more RuvC domain and one or more Nuc domain. In certain embodiments, the CRISPR effector comprises a RuvC-I domain and a Nuc domain. In certain embodiments, the CRISPR effector comprises a RuvC-II domain and a Nuc domain. In certain embodiments, the CRISPR effector comprises a RuvC-III domain and a Nuc domain.

[0623] In certain embodiments, the CRISPR effector comprises one or more HEPN domain. In certain embodiments, the CRISPR effector comprises a HEPN I domain. In certain embodiments, the CRISPR effector comprises a HEPN II domain. In certain embodiments, the CRISPR effector comprises a HEPN I domain and a HEPN II domain. In certain embodiments, one or more of the HEPN domains are contiguous domains. In certain embodiments, one or more of the HEPN domains comprise non-contiguous or discrete motifs.

[0624] In certain embodiments, the CRISPR effector is a CRISPR effector as disclosed for instance in Shmakov et al. (2017), “Diversity and evolution of class 2 CRISPR-Cas systems”, Nature Rev Microbiol, 15(3):169-182; Shmakov et al. (2015) “Discovery and functional characterization of diverse class 2 CRISPR-Cas systems”, Mol Cell, 60(3):385-397; Makarova et al. (2015), “An updated evolutionary classification of CRISPR-Cas systems”, Nat Rev Microbiol, 13(11):722-736; or Koonin et al. (2017), “Diversity, classification and evolution of CRISPR-Cas systems”, Curr Opin Microbiol, 37:67-78. All are incorporated herein by reference in their entirety, as well as the references cited therein.

[0625] The skilled person will understand that the choice of CRISPR effector may depend on the application (e.g. knockout or suppression, activation, . . . ), as well as the target (e.g. RNA or DNA, single or double stranded, as well as target sequence, including associated PAM sequence and/or specificity, . . . ). It will be understood, that the choice of CRISPR effector may determine the particulars of other CRISPR-Cas system components (e.g. spacer (or guide sequence) length, direct repeat (or tracr mate) sequence or length, the presence or absence of a tracr, as well as tracr sequence or length, etc.).

[0626] CRISPR-Cas systems have been identified in numerous archaeal and bacterial species. The skilled person will understand that CRISPR effector homologues or orthologues from any of the identified CRISPR-Cas systems may advantageously be used in certain embodiments. It will be understood that further homologues (e.g. additional class 2 types of CRISPR-Cas systems and CRISPR effectors) or orthologues (e.g. known or unknown CRISPR-Cas systems or CRISPR effectors from additional archaeal or bacterial species) can be identified. Such may suitably be used in certain embodiments and aspects of the invention.

[0627] By means of example, CRISPR-Cas systems (and CRISPR effectors) may be identified for instance and without limitation as described in Shmakov et al. (2017), “Diversity and evolution of class 2 CRISPR-Cas systems”, Nature Rev Microbiol, 15(3):169-182 or Shmakov et al. (2015) “Discovery and functional characterization of diverse class 2 CRISPR-Cas systems”, Mol Cell, 60(3):385-397. The methodology for identifying CRISPR-Cas systems and effectors is explicitly incorporated herein by reference.

[0628] In certain embodiments, a method for the systematic detection of class 2 CRISPR-Cas systems may begin with the identification of a ‘seed’ that signifies the likely presence of a CRISPR-Cas locus in a given nucleotide sequence. For instance, Cas1 may be used as the seed, as it is the most common Cas protein in CRISPR-Cas systems and is most highly conserved at the sequence level. Sequence databases may be searched with this seed. To ensure the maximum sensitivity of detection, the search may be carried out by comparing a Cas1 sequence profile to translated genomic and metagenomic sequences. After the Cas1 genes are detected, their respective ‘neighbourhoods’ are examined for the presence of other Cas genes by searching with previously developed profiles for Cas proteins and applying the criteria for the classification of the CRISPR-Cas loci. In a complementary approach, to extend the search to non-autonomous CRISPR-Cas systems, the same procedure may be repeated using the CRISPR array as the seed. To ensure that the CRISPR array is detected at a high level of sensitivity, the predictions can be made for instance using the Piler-CR72 and CRISPRfinder methods, which predictions can be pooled and taken as the final CRISPR set. As illustrated in Shmakov et al. (2017), “Diversity and evolution of class 2 CRISPR-Cas systems”, Nature Rev Microbiol, 15(3):169-182, this latter procedure (i.e. using the CRISPR array as seed) yielded 47,174 CRISPR arrays, which is more than twice the number of Cas1 genes that were detected, reflecting the fact that many CRISPR-Cas loci lack the adaptation module and that numerous ‘orphan’ arrays, some of which seem to be functional, also exist.

[0629] All loci can either subsequently be assigned to known CRISPR-Cas subtypes through the Cas protein profile search or alternatively can be assigned to new subtypes. In certain embodiments, among the Cas1 or CRISPR neighborhoods, those that encode large proteins (>500 amino acids) can be analyzed in detail, given that Cas9 and Cpf1 are large proteins (typically >1000 amino acids) and that their protein structures suggest that this large size is required to accommodate the CRISPR RNA (crRNA)-target DNA complex. The sequences of such large proteins can then be screened for known protein domains using sensitive profile-based methods, such as HHpred, secondary structure prediction and manual examination of multiple alignments. Under the premise that class 2 effector proteins contain nuclease domains, even if they are distantly related or unrelated to known families of nucleases, the proteins that contain domains that are deemed irrelevant in the context of the CRISPR-Cas function (for example, membrane transporters or metabolic enzymes) can be discarded. The retained proteins either contain readily identifiable, or completely unknown, nuclease domains. The sequences of these proteins can then be analyzed using the most sensitive methods for domain detection, such as HHpred, with a curated multiple alignment of the respective protein sequences that can be used as the query. The use of sensitive methods is essential because proteins that are involved in antiviral defense, and the Cas proteins in particular, typically evolve extremely fast. The above procedure for the discovery of class 2 CRISPR-Cas systems, at least in principle, is expected to be exhaustive, because all loci that contain a gene that encodes a large protein (that is, a putative class 2 effector) in the vicinity of cas1 and/or CRISPR are analyzed in detail. The assumption of the structural requirements for a class 2 effector, which underlie the protein size cut-off that is used, and the precision of Cas1 and CRISPR detection, are the only limitations of this approach.

[0630] In certain embodiments, the CRISPR effector is a CRISPR effector as identified for instance according to the methodology presented above. It will be understood that functionality of the identified CRISPR effectors can be readily evaluated and validated by the skilled person.

[0631] Base Excision Repair Inhibitor

[0632] In some embodiments, the AD-functionalized CRISPR system further comprises a base excision repair (BER) inhibitor. Without wishing to be bound by any particular theory, cellular DNA-repair response to the presence of I:T pairing may be responsible for a decrease in nucleobase editing efficiency in cells. Alkyladenine DNA glycosylase (also known as DNA-3-methyladenine glycosylase, 3-alkyladenine DNA glycosylase, or N-methylpurine DNA glycosylase) catalyzes removal of hypoxanthine from DNA in cells, which may initiate base excision repair, with reversion of the I:T pair to a A:T pair as outcome.

[0633] In some embodiments, the BER inhibitor is an inhibitor of alkyladenine DNA glycosylase. In some embodiments, the BER inhibitor is an inhibitor of human alkyladenine DNA glycosylase. In some embodiments, the BER inhibitor is a polypeptide inhibitor. In some embodiments, the BER inhibitor is a protein that binds hypoxanthine. In some embodiments, the BER inhibitor is a protein that binds hypoxanthine in DNA. In some embodiments, the BER inhibitor is a catalytically inactive alkyladenine DNA glycosylase protein or binding domain thereof. In some embodiments, the BER inhibitor is a catalytically inactive alkyladenine DNA glycosylase protein or binding domain thereof that does not excise hypoxanthine from the DNA. Other proteins that are capable of inhibiting (e.g., sterically blocking) an alkyladenine DNA glycosylase base-excision repair enzyme are within the scope of this disclosure. Additionally, any proteins that block or inhibit base-excision repair as also within the scope of this disclosure.

[0634] Without wishing to be bound by any particular theory, base excision repair may be inhibited by molecules that bind the edited strand, block the edited base, inhibit alkyladenine DNA glycosylase, inhibit base excision repair, protect the edited base, and/or promote fixing of the non-edited strand. It is believed that the use of the BER inhibitor described herein can increase the editing efficiency of an adenosine deaminase that is capable of catalyzing a A to I change.

[0635] Accordingly, in the first design of the AD-functionalized CRISPR system discussed above, the CRISPR-Cas protein or the adenosine deaminase can be fused to or linked to a BER inhibitor (e.g., an inhibitor of alkyladenine DNA glycosylase). In some embodiments, the BER inhibitor can be comprised in one of the following structures (nCas13=Cas13 nickase; dCas13=dead Cas13); [AD]-[optional linker]-[nCas13/dCas13]-[optional linker]-[BER inhibitor]; [AD]-[optional linker]-[BER inhibitor]-[optional linker]-[nCas13/dCas13]; [BER inhibitor]-[optional linker]-[AD]-[optional linker]-[nCas13/dCas13]; [BER inhibitor]-[optional linker]-[nCas13/dCas13]-[optional linker]-[AD]; [nCas13/dCas13]-[optional linker]-[AD]-[optional linker]-[BER inhibitor]; [nCas13/dCas13]-[optional linker]-[BER inhibitor]-[optional linker]-[AD].

[0636] Similarly, in the second design of the AD-functionalized CRISPR system discussed above, the CRISPR-Cas protein, the adenosine deaminase, or the adaptor protein can be fused to or linked to a BER inhibitor (e.g., an inhibitor of alkyladenine DNA glycosylase). In some embodiments, the BER inhibitor can be comprised in one of the following structures (nCas13=Cas13 nickase; dCas13=dead Cas13): [nCas13/dCas13]-[optional linker]-[BER inhibitor]; [BER inhibitor]-[optional linker]-[nCas13/dCas13]; [AD]-[optional linker]-[Adaptor]-[optional linker]-[BER inhibitor]; [AD]-[optional linker]-[BER inhibitor]-[optional linker]-[Adaptor]; [BER inhibitor]-[optional linker]-[AD]-[optional linker]-[Adaptor]; [BER inhibitor]-[optional linker]-[Adaptor]-[optional linker]-[AD]; [Adaptor]-[optional linker]-[AD]-[optional linker]-[BER inhibitor]; [Adaptor]-[optional linker]-[BER inhibitor]-[optional linker]-[AD].

[0637] In the third design of the AD-functionalized CRISPR system discussed above, the BER inhibitor can be inserted into an internal loop or unstructured region of a CRISPR-Cas protein.

[0638] Targeting to the Nucleus

[0639] In some embodiments, the methods of the present invention relate to modifying an Adenine in a target locus of interest, whereby the target locus is within a cell. In order to improve targeting of the CRISPR-Cas protein and/or the adenosine deaminase protein or catalytic domain thereof used in the methods of the present invention to the nucleus, it may be advantageous to provide one or both of these components with one or more nuclear localization sequences (NLSs).

[0640] In preferred embodiments, the NLSs used in the context of the present invention are heterologous to the proteins. Non-limiting examples of NLSs include an NLS sequence derived from: the NLS of the SV40 virus large T-antigen, having the amino acid sequence PKKKRKV (SEQ ID No. 17) or PKKKRKVEAS (SEQ ID No. 18); the NLS from nucleoplasmin (e.g., the nucleoplasmin bipartite NLS with the sequence KRPAATKKAGQAKKKK (SEQ ID No. 19)); the c-myc NLS having the amino acid sequence PAAKRVKLD (SEQ ID No. 20) or RQRRNELKRSP (SEQ ID No. 21); the hRNPA1 M9 NLS having the sequence NQSSNFGPMKGGNFGGRSSGPYGGGGQYFAKPRNQGGY (SEQ ID No. 22); the sequence RMRIZFKNKGKDTAELRRRRVEVSVELRKAKKDEQILKRRNV (SEQ ID No. 23) of the IBB domain from importin-alpha; the sequences VSRKRPRP (SEQ ID No. 24) and PPKKARED (SEQ ID No. 25) of the myoma T protein; the sequence PQPKKKPL (SEQ ID No. 26) of human p53; the sequence SALIKKKKKMAP (SEQ ID No. 27) of mouse c-abl IV; the sequences DRLRR (SEQ ID No. 28) and PKQKKRK (SEQ ID No. 29) of the influenza virus NS1; the sequence RKLKKKIKKL (SEQ ID No. 30) of the Hepatitis virus delta antigen; the sequence REKKKFLKRR (SEQ ID No. 31) of the mouse Mxl protein; the sequence KRKGDEVDGVDEVAKKKSKK (SEQ ID No. 32) of the human poly(ADP-ribose) polymerase; and the sequence RKCLQAGMNLEARKTKK (SEQ ID No. 33) of the steroid hormone receptors (human) glucocorticoid. In general, the one or more NLSs are of sufficient strength to drive accumulation of the DNA-targeting Cas protein in a detectable amount in the nucleus of a eukaryotic cell. In general, strength of nuclear localization activity may derive from the number of NLSs in the CRISPR-Cas protein, the particular NLS(s) used, or a combination of these factors. Detection of accumulation in the nucleus may be performed by any suitable technique. For example, a detectable marker may be fused to the nucleic acid-targeting protein, such that location within a cell may be visualized, such as in combination with a means for detecting the location of the nucleus (e.g., a stain specific for the nucleus such as DAPI). Cell nuclei may also be isolated from cells, the contents of which may then be analyzed by any suitable process for detecting protein, such as immunohistochemistry, Western blot, or enzyme activity assay. Accumulation in the nucleus may also be determined indirectly, such as by an assay for the effect of nucleic acid-targeting complex formation (e.g., assay for deaminase activity) at the target sequence, or assay for altered gene expression activity affected by DNA-targeting complex formation and/or DNA-targeting), as compared to a control not exposed to the CRISPR-Cas protein and deaminase protein, or exposed to a CRISPR-Cas and/or deaminase protein lacking the one or more NLSs.

[0641] The CRISPR-Cas and/or adenosine deaminase proteins may be provided with 1 or more, such as with, 2, 3, 4, 5, 6, 7, 8, 9, 10, or more heterologous NLSs. In some embodiments, the proteins comprises about or more than about 1, 2, 3, 4, 5, 6, 7, 8, 9, 10, or more NLSs at or near the amino-terminus, about or more than about 1, 2, 3, 4, 5, 6, 7, 8, 9, 10, or more NLSs at or near the carboxy-terminus, or a combination of these (e.g., zero or at least one or more NLS at the amino-terminus and zero or at one or more NLS at the carboxy terminus). When more than one NLS is present, each may be selected independently of the others, such that a single NLS may be present in more than one copy and/or in combination with one or more other NLSs present in one or more copies. In some embodiments, an NLS is considered near the N- or C-terminus when the nearest amino acid of the NLS is within about 1, 2, 3, 4, 5, 10, 15, 20, 25, 30, 40, 50, or more amino acids along the polypeptide chain from the N- or C-terminus. In preferred embodiments of the CRISPR-Cas proteins, an NLS attached to the C-terminal of the protein.

[0642] In certain embodiments of the methods provided herein, the CRISPR-Cas protein and the deaminase protein are delivered to the cell or expressed within the cell as separate proteins. In these embodiments, each of the CRISPR-Cas and deaminase protein can be provided with one or more NLSs as described herein. In certain embodiments, the CRISPR-Cas and deaminase proteins are delivered to the cell or expressed with the cell as a fusion protein. In these embodiments one or both of the CRISPR-Cas and deaminase protein is provided with one or more NLSs. Where the adenosine deaminase is fused to an adaptor protein (such as MS2) as described above, the one or more NLS can be provided on the adaptor protein, provided that this does not interfere with aptamer binding. In particular embodiments, the one or more NLS sequences may also function as linker sequences between the adenosine deaminase and the CRISPR-Cas protein.

[0643] In certain embodiments, guides of the invention comprise specific binding sites (e.g. aptamers) for adapter proteins, which may be linked to or fused to an adenosine deaminase or catalytic domain thereof. When such a guides forms a CRISPR complex (i.e. CRISPR-Cas protein binding to guide and target) the adapter proteins bind and, the adenosine deaminase or catalytic domain thereof associated with the adapter protein is positioned in a spatial orientation which is advantageous for the attributed function to be effective.

[0644] The skilled person will understand that modifications to the guide which allow for binding of the adapter+adenosine deaminase, but not proper positioning of the adapter+adenosine deaminase (e.g. due to steric hindrance within the three dimensional structure of the CRISPR complex) are modifications which are not intended. The one or more modified guide may be modified at the tetra loop, the stem loop 1, stem loop 2, or stem loop 3, as described herein, preferably at either the tetra loop or stem loop 2, and most preferably at both the tetra loop and stem loop 2.

[0645] Use of Orthogonal Catalytically Inactive CRISPR-Cas Proteins

[0646] In particular embodiments, the Cas13 nickase is used in combination with an orthogonal catalytically inactive CRISPR-Cas protein to increase efficiency of said Cas13 nickase (as described in Chen et al. 2017, Nature Communications 8:14958; doi:10.1038/ncomms14958). More particularly, the orthogonal catalytically inactive CRISPR-Cas protein is characterized by a different PAM recognition site than the Cas13 nickase used in the AD-functionalized CRISPR system and the corresponding guide sequence is selected to bind to a target sequence proximal to that of the Cas13 nickase of the AD-functionalized CRISPR system. The orthogonal catalytically inactive CRISPR-Cas protein as used in the context of the present invention does not form part of the AD-functionalized CRISPR system but merely functions to increase the efficiency of said Cas13 nickase and is used in combination with a standard guide molecule as described in the art for said CRISPR-Cas protein. In particular embodiments, said orthogonal catalytically inactive CRISPR-Cas protein is a dead CRISPR-Cas protein, i.e. comprising one or more mutations which abolishes the nuclease activity of said CRISPR-Cas protein. In particular embodiments, the catalytically inactive orthogonal CRISPR-Cas protein is provided with two or more guide molecules which are capable of hybridizing to target sequences which are proximal to the target sequence of the Cas13 nickase. In particular embodiments, at least two guide molecules are used to target said catalytically inactive CRISPR-Cas protein, of which at least one guide molecule is capable of hybridizing to a target sequence 5″ of the target sequence of the Cas13 nickase and at least one guide molecule is capable of hybridizing to a target sequence 3′ of the target sequence of the Cas13 nickase of the AD-functionalized CRISPR system, whereby said one or more target sequences may be on the same or the opposite DNA strand as the target sequence of the Cas13 nickase. In particular embodiments, the guide sequences for the one or more guide molecules of the orthogonal catalytically inactive CRISPR-Cas protein are selected such that the target sequences are proximal to that of the guide molecule for the targeting of the AD-functionalized CRISPR, i.e. for the targeting of the Cas13 nickase. In particular embodiments, the one or more target sequences of the orthogonal catalytically inactive CRISPR-Cas enzyme are each separated from the target sequence of the Cas13 nickase by more than 5 but less than 450 basepairs. Optimal distances between the target sequences of the guides for use with the orthogonal catalytically inactive CRISPR-Cas protein and the target sequence of the AD-functionalized CRISPR system can be determined by the skilled person. In particular embodiments, the orthogonal CRISPR-Cas protein is a Class II, type II CRISPR protein. In particular embodiments, the orthogonal CRISPR-Cas protein is a Class II, type V CRISPR protein. In particular embodiments, the catalytically inactive orthogonal CRISPR-Cas protein In particular embodiments, the catalytically inactive orthogonal CRISPR-Cas protein has been modified to alter its PAM specificity as described elsewhere herein. In particular embodiments, the Cas13 protein nickase is a nickase which, by itself has limited activity in human cells, but which, in combination with an inactive orthogonal CRISPR-Cas protein and one or more corresponding proximal guides ensures the required nickase activity. CRISPR Development and Use

[0647] The present invention may be further illustrated and extended based on aspects of CRISPR-Cas development and use as set forth in the following articles and particularly as relates to delivery of a CRISPR protein complex and uses of an RNA guided endonuclease in cells and organisms:
[0648] Multiplex genome engineering using CRISPR-Cas systems. Cong, L., Ran, F. A., Cox, D., Lin, S., Barretto, R., Habib, N., Hsu, P. D., Wu, X., Jiang, W., Marraffini, L. A., & Zhang, F. Science February 15; 339(6121):819-23 (2013);
[0649] RNA-guided editing of bacterial genomes using CRISPR-Cas systems. Jiang W., Bikard D., Cox D., Zhang F, Marraffini L A. Nat Biotechnol March; 31(3):233-9 (2013);
[0650] One-Step Generation of Mice Carrying Mutations in Multiple Genes by CRISPR-Cas-Mediated Genome Engineering. Wang H., Yang H., Shivalila C S., Dawlaty M M., Cheng A W., Zhang F., Jaenisch R. Cell May 9; 153(4):910-8 (2013);
[0651] Optical control of mammalian endogenous transcription and epigenetic states. Konermann S, Brigham M D, Trevino A E, Hsu P D, Heidenreich M, Cong L, Platt R J, Scott D A, Church G M, Zhang F. Nature. August 22; 500(7463):472-6. doi: 10.1038/Nature12466. Epub 2013 Aug. 23 (2013);
[0652] Double Nicking by RNA-Guided CRISPR Cas9 for Enhanced Genome Editing Specificity. Ran, F A., Hsu, P D., Lin, C Y., Gootenberg, J S., Konermann, S., Trevino, A E., Scott, D A., Inoue, A., Matoba, S., Zhang, Y., & Zhang, F. Cell August 28. pii: S0092-8674(13)01015-5 (2013-A);
[0653] DNA targeting specificity of RNA-guided Cas9 nucleases. Hsu, P., Scott, D., Weinstein, J., Ran, F A., Konermann, S., Agarwala, V., Li, Y., Fine, E., Wu, X., Shalem, O., Cradick, T J., Marraffini, L A., Bao, G., & Zhang, F. Nat Biotechnol doi:10.1038/nbt.2647(2013);
[0654] Genome engineering using the CRISPR-Cas9 system. Ran, F A., Hsu, P D., Wright, J., Agarwala, V., Scott, D A., Zhang, F. Nature Protocols November; 8(11):2281-308 (2013-B);
[0655] Genome-Scale CRISPR-Cas9 Knockout Screening in Human Cells. Shalem, O., Sanjana, N E., Hartenian, E., Shi, X., Scott, D A., Mikkelson, T., Heckl, D., Ebert, B L., Root, D E., Doench, J G., Zhang, F. Science December 12. (2013);
[0656] Crystal structure of cas9 in complex with guide RNA and target DNA. Nishimasu, H., Ran, F A., Hsu, P D., Konermann, S., Shehata, S I., Dohmae, N., Ishitani, R., Zhang, F., Nureki, O. Cell February 27, 156(5):935-49 (2014);
[0657] Genome-wide binding of the CRISPR endonuclease Cas9 in mammalian cells. Wu X., Scott D A., Kriz A J., Chiu A C., Hsu P D., Dadon D B., Cheng A W., Trevino A E., Konermann S., Chen S., Jaenisch R., Zhang F., Sharp P A. Nat Biotechnol. April 20. doi: 10.1038/nbt.2889 (2014);
[0658] CRISPR-Cas9 Knockin Mice for Genome Editing and Cancer Modeling. Platt R J, Chen S, Zhou Y, Yim M J, Swiech L, Kempton H R, Dahlman J E, Parnas O, Eisenhaure™, Jovanovic M, Graham D B, Jhunjhunwala S, Heidenreich M, Xavier R J, Langer R, Anderson D G, Hacohen N, Regev A, Feng G, Sharp P A, Zhang F. Cell 159(2): 440-455 DOI: 10.1016/j.cell.2014.09.014(2014);
[0659] Development and Applications of CRISPR-Cas9 for Genome Engineering, Hsu P D, Lander E S, Zhang F., Cell. June 5; 157(6):1262-78 (2014).
[0660] Genetic screens in human cells using the CRISPR-Cas9 system, Wang T, Wei J J, Sabatini D M, Lander E S., Science. January 3; 343(6166): 80-84. doi:10.1126/science.1246981(2014);
[0661] Rational design of highly active sgRNAs for CRISPR-Cas9-mediated gene inactivation, Doench J G, Hartenian E, Graham D B, Tothova Z, Hegde M, Smith I, Sullender M, Ebert B L, Xavier R J, Root D E., (published online 3 Sep. 2014) Nat Biotechnol. December; 32(12):1262-7 (2014);
[0662] In vivo interrogation of gene function in the mammalian brain using CRISPR-Cas9, Swiech L, Heidenreich M, Banerjee A, Habib N, Li Y, Trombetta J, Sur M, Zhang F., (published online 19 Oct. 2014) Nat Biotechnol. January; 33(1):102-6 (2015);
[0663] Genome-scale transcriptional activation by an engineered CRISPR-Cas9 complex, Konermann S, Brigham M D, Trevino A E, Joung J, Abudayyeh O O, Barcena C, Hsu P D, Habib N, Gootenberg J S, Nishimasu H, Nureki O, Zhang F., Nature. January 29; 517(7536):583-8 (2015).
[0664] A split-Cas9 architecture for inducible genome editing and transcription modulation, Zetsche B, Volz S E, Zhang F., (published online 2 Feb. 2015) Nat Biotechnol. February; 33(2):139-42 (2015);
[0665] Genome-wide CRISPR Screen in a Mouse Model of Tumor Growth and Metastasis, Chen S, Sanjana N E, Zheng K, Shalem O, Lee K, Shi X, Scott D A, Song J, Pan J Q, Weissleder R, Lee H, Zhang F, Sharp P A. Cell 160, 1246-1260, Mar. 12, 2015 (multiplex screen in mouse), and
[0666] In vivo genome editing using Staphylococcus aureus Cas9, Ran F A, Cong L, Yan W X, Scott D A, Gootenberg J S, Kriz A J, Zetsche B, Shalem O, Wu X, Makarova K S, Koonin E V, Sharp P A, Zhang F., (published online 1 Apr. 2015), Nature. April 9; 520(7546):186-91 (2015).
[0667] Shalem et al., “High-throughput functional genomics using CRISPR-Cas9,” Nature Reviews Genetics 16, 299-311 (May 2015).
[0668] Xu et al., “Sequence determinants of improved CRISPR sgRNA design,” Genome Research 25, 1147-1157 (August 2015).
[0669] Parnas et al., “A Genome-wide CRISPR Screen in Primary Immune Cells to Dissect Regulatory Networks,” Cell 162, 675-686 (Jul. 30, 2015).
[0670] Ramanan et al., CRISPR-Cas9 cleavage of viral DNA efficiently suppresses hepatitis B virus,” Scientific Reports 5:10833. doi: 10.1038/srep10833 (Jun. 2, 2015)
[0671] Nishimasu et al., Crystal Structure of Staphylococcus aureus Cas9,” Cell 162, 1113-1126 (Aug. 27, 2015)
[0672] BCL11A enhancer dissection by Cas9-mediated in situ saturating mutagenesis, Canver et al., Nature 527(7577):192-7 (Nov. 12, 2015) doi: 10.1038/nature15521. Epub 2015 September 16.
[0673] Cas13 Is a Single RNA-Guided Endonuclease of a Class 2 CRISPR-Cas System, Zetsche et al., Cell 163, 759-71 (Sep. 25, 2015).
[0674] Discovery and Functional Characterization of Diverse Class 2 CRISPR-Cas Systems, Shmakov et al., Molecular Cell, 60(3), 385-397 doi: 10.1016/j.molcel.2015.10.008 Epub Oct. 22, 2015.
[0675] Rationally engineered Cas9 nucleases with improved specificity, Slaymaker et al., Science 2016 Jan. 1 351(6268): 84-88 doi: 10.1126/science.aad5227. Epub 2015 Dec. 1.
[0676] Gao et al, “Engineered Cas13 Enzymes with Altered PAM Specificities,” bioRxiv 091611; doi: http://dx.doi.org/10.1101/091611 (Dec. 4, 2016). each of which is incorporated herein by reference, may be considered in the practice of the instant invention, and discussed briefly below:
[0677] Cong et al. engineered type II CRISPR-Cas systems for use in eukaryotic cells based on both Streptococcus thermophilus Cas9 and also Streptococcus pyogenes Cas9 and demonstrated that Cas9 nucleases can be directed by short RNAs to induce precise cleavage of DNA in human and mouse cells. Their study further showed that Cas9 as converted into a nicking enzyme can be used to facilitate homology-directed repair in eukaryotic cells with minimal mutagenic activity. Additionally, their study demonstrated that multiple guide sequences can be encoded into a single CRISPR array to enable simultaneous editing of several at endogenous genomic loci sites within the mammalian genome, demonstrating easy programmability and wide applicability of the RNA-guided nuclease technology. This ability to use RNA to program sequence specific DNA cleavage in cells defined a new class of genome engineering tools. These studies further showed that other CRISPR loci are likely to be transplantable into mammalian cells and can also mediate mammalian genome cleavage. Importantly, it can be envisaged that several aspects of the CRISPR-Cas system can be further improved to increase its efficiency and versatility.
[0678] Jiang et al. used the clustered, regularly interspaced, short palindromic repeats (CRISPR)-associated Cas9 endonuclease complexed with dual-RNAs to introduce precise mutations in the genomes of Streptococcus pneumoniae and Escherichia coli. The approach relied on dual-RNA:Cas9-directed cleavage at the targeted genomic site to kill unmutated cells and circumvents the need for selectable markers or counter-selection systems. The study reported reprogramming dual-RNA:Cas9 specificity by changing the sequence of short CRISPR RNA (crRNA) to make single- and multinucleotide changes carried on editing templates. The study showed that simultaneous use of two crRNAs enabled multiplex mutagenesis. Furthermore, when the approach was used in combination with recombineering, in S. pneumoniae, nearly 100% of cells that were recovered using the described approach contained the desired mutation, and in E. coli, 65% that were recovered contained the mutation.
[0679] Wang et al. (2013) used the CRISPR-Cas system for the one-step generation of mice carrying mutations in multiple genes which were traditionally generated in multiple steps by sequential recombination in embryonic stem cells and/or time-consuming intercrossing of mice with a single mutation. The CRISPR-Cas system will greatly accelerate the in vivo study of functionally redundant genes and of epistatic gene interactions.
[0680] Konermann et al. (2013) addressed the need in the art for versatile and robust technologies that enable optical and chemical modulation of DNA-binding domains based CRISPR Cas9 enzyme and also Transcriptional Activator Like Effectors
[0681] Ran et al. (2013-A) described an approach that combined a Cas9 nickase mutant with paired guide RNAs to introduce targeted double-strand breaks. This addresses the issue of the Cas9 nuclease from the microbial CRISPR-Cas system being targeted to specific genomic loci by a guide sequence, which can tolerate certain mismatches to the DNA target and thereby promote undesired off-target mutagenesis. Because individual nicks in the genome are repaired with high fidelity, simultaneous nicking via appropriately offset guide RNAs is required for double-stranded breaks and extends the number of specifically recognized bases for target cleavage. The authors demonstrated that using paired nicking can reduce off-target activity by 50- to 1,500-fold in cell lines and to facilitate gene knockout in mouse zygotes without sacrificing on-target cleavage efficiency. This versatile strategy enables a wide variety of genome editing applications that require high specificity.
[0682] Hsu et al. (2013) characterized SpCas9 targeting specificity in human cells to inform the selection of target sites and avoid off-target effects. The study evaluated >700 guide RNA variants and SpCas9-induced indel mutation levels at >100 predicted genomic off-target loci in 293T and 293FT cells. The authors that SpCas9 tolerates mismatches between guide RNA and target DNA at different positions in a sequence-dependent manner, sensitive to the number, position and distribution of mismatches. The authors further showed that SpCas9-mediated cleavage is unaffected by DNA methylation and that the dosage of SpCas9 and guide RNA can be titrated to minimize off-target modification. Additionally, to facilitate mammalian genome engineering applications, the authors reported providing a web-based software tool to guide the selection and validation of target sequences as well as off-target analyses.
[0683] Ran et al. (2013-B) described a set of tools for Cas9-mediated genome editing via non-homologous end joining (NHEJ) or homology-directed repair (HDR) in mammalian cells, as well as generation of modified cell lines for downstream functional studies. To minimize off-target cleavage, the authors further described a double-nicking strategy using the Cas9 nickase mutant with paired guide RNAs. The protocol provided by the authors experimentally derived guidelines for the selection of target sites, evaluation of cleavage efficiency and analysis of off-target activity. The studies showed that beginning with target design, gene modifications can be achieved within as little as 1-2 weeks, and modified clonal cell lines can be derived within 2-3 weeks.
[0684] Shalem et al. described a new way to interrogate gene function on a genome-wide scale. Their studies showed that delivery of a genome-scale CRISPR-Cas9 knockout (GeCKO) library targeted 18,080 genes with 64,751 unique guide sequences enabled both negative and positive selection screening in human cells. First, the authors showed use of the GeCKO library to identify genes essential for cell viability in cancer and pluripotent stem cells. Next, in a melanoma model, the authors screened for genes whose loss is involved in resistance to vemurafenib, a therapeutic that inhibits mutant protein kinase BRAF. Their studies showed that the highest-ranking candidates included previously validated genes NF1 and MED12 as well as novel hits NF2, CUL3, TADA2B, and TADA1. The authors observed a high level of consistency between independent guide RNAs targeting the same gene and a high rate of hit confirmation, and thus demonstrated the promise of genome-scale screening with Cas9.
[0685] Nishimasu et al. reported the crystal structure of Streptococcus pyogenes Cas9 in complex with sgRNA and its target DNA at 2.5 A° resolution. The structure revealed a bilobed architecture composed of target recognition and nuclease lobes, accommodating the sgRNA:DNAn RNA duplex in a positively charged groove at their interface. Whereas the recognition lobe is essential for binding sgRNA and DNA, the nuclease lobe contains the HNH and RuvC nuclease domains, which are properly positioned for cleavage of the complementary and non-complementary strands of the target DNA, respectively. The nuclease lobe also contains a carboxyl-terminal domain responsible for the interaction with the protospacer adjacent motif (PAM). This high-resolution structure and accompanying functional analyses have revealed the molecular mechanism of RNA-guided DNA targeting by Cas9, thus paving the way for the rational design of new, versatile genome-editing technologies.
[0686] Wu et al. mapped genome-wide binding sites of a catalytically inactive Cas9 (dCas9) from Streptococcus pyogenes loaded with single guide RNAs (sgRNAs) in mouse embryonic stem cells (mESCs). The authors showed that each of the four sgRNAs tested targets dCas9 to between tens and thousands of genomic sites, frequently characterized by a 5-nucleotide seed region in the sgRNA and an NGG protospacer adjacent motif (PAM). Chromatin inaccessibility decreases dCas9 binding to other sites with matching seed sequences; thus 70% of off-target sites are associated with genes. The authors showed that targeted sequencing of 295 dCas9 binding sites in mESCs transfected with catalytically active Cas9 identified only one site mutated above background levels. The authors proposed a two-state model for Cas9 binding and cleavage, in which a seed match triggers binding but extensive pairing with target DNA is required for cleavage.
[0687] Platt et al. established a Cre-dependent Cas9 knockin mouse. The authors demonstrated in vivo as well as ex vivo genome editing using adeno-associated virus (AAV)-, lentivirus-, or particle-mediated delivery of guide RNA in neurons, immune cells, and endothelial cells.
[0688] Hsu et al. (2014) is a review article that discusses generally CRISPR-Cas9 history from yogurt to genome editing, including genetic screening of cells.
[0689] Wang et al. (2014) relates to a pooled, loss-of-function genetic screening approach suitable for both positive and negative selection that uses a genome-scale lentiviral single guide RNA (sgRNA) library.
[0690] Doench et al. created a pool of sgRNAs, tiling across all possible target sites of a panel of six endogenous mouse and three endogenous human genes and quantitatively assessed their ability to produce null alleles of their target gene by antibody staining and flow cytometry. The authors showed that optimization of the PAM improved activity and also provided an on-line tool for designing sgRNAs.
[0691] Swiech et al. demonstrate that AAV-mediated SpCas9 genome editing can enable reverse genetic studies of gene function in the brain.
[0692] Konermann et al. (2015) discusses the ability to attach multiple effector domains, e.g., transcriptional activator, functional and epigenomic regulators at appropriate positions on the guide such as stem or tetraloop with and without linkers.
[0693] Zetsche et al. demonstrates that the Cas9 enzyme can be split into two and hence the assembly of Cas9 for activation can be controlled.
[0694] Chen et al. relates to multiplex screening by demonstrating that a genome-wide in vivo CRISPR-Cas9 screen in mice reveals genes regulating lung metastasis.
[0695] Ran et al. (2015) relates to SaCas9 and its ability to edit genomes and demonstrates that one cannot extrapolate from biochemical assays.
[0696] Shalem et al. (2015) described ways in which catalytically inactive Cas9 (dCas9) fusions are used to synthetically repress (CRISPRi) or activate (CRISPRa) expression, showing. advances using Cas9 for genome-scale screens, including arrayed and pooled screens, knockout approaches that inactivate genomic loci and strategies that modulate transcriptional activity.
[0697] Xu et al. (2015) assessed the DNA sequence features that contribute to single guide RNA (sgRNA) efficiency in CRISPR-based screens. The authors explored efficiency of CRISPR-Cas9 knockout and nucleotide preference at the cleavage site. The authors also found that the sequence preference for CRISPRi/a is substantially different from that for CRISPR-Cas9 knockout.
[0698] Parnas et al. (2015) introduced genome-wide pooled CRISPR-Cas9 libraries into dendritic cells (DCs) to identify genes that control the induction of tumor necrosis factor (Tnf) by bacterial lipopolysaccharide (LPS). Known regulators of Tlr4 signaling and previously unknown candidates were identified and classified into three functional modules with distinct effects on the canonical responses to LPS.
[0699] Ramanan et al (2015) demonstrated cleavage of viral episomal DNA (cccDNA) in infected cells. The HBV genome exists in the nuclei of infected hepatocytes as a 3.2 kb double-stranded episomal DNA species called covalently closed circular DNA (cccDNA), which is a key component in the HBV life cycle whose replication is not inhibited by current therapies. The authors showed that sgRNAs specifically targeting highly conserved regions of HBV robustly suppresses viral replication and depleted cccDNA.
[0700] Nishimasu et al. (2015) reported the crystal structures of SaCas9 in complex with a single guide RNA (sgRNA) and its double-stranded DNA targets, containing the 5′-TTGAAT-3′ PAM and the 5′-TTGGGT-3′ PAM. A structural comparison of SaCas9 with SpCas9 highlighted both structural conservation and divergence, explaining their distinct PAM specificities and orthologous sgRNA recognition.
[0701] Canver et al. (2015) demonstrated a CRISPR-Cas9-based functional investigation of non-coding genomic elements. The authors we developed pooled CRISPR-Cas9 guide RNA libraries to perform in situ saturating mutagenesis of the human and mouse BCL11A enhancers which revealed critical features of the enhancers.
[0702] Zetsche et al. (2015) reported characterization of Cas13, a class 2 CRISPR nuclease from Francisella novicida U112 having features distinct from Cas9. Cas13 is a single RNA-guided endonuclease lacking tracrRNA, utilizes a T-rich protospacer-adjacent motif, and cleaves DNA via a staggered DNA double-stranded break.
[0703] Shmakov et al. (2015) reported three distinct Class 2 CRISPR-Cas systems. Two system CRISPR enzymes (C2c1 and C2c3) contain RuvC-like endonuclease domains distantly related to Cas13. Unlike Cas13, C2c1 depends on both crRNA and tracrRNA for DNA cleavage. The third enzyme (C2c2) contains two predicted HEPN RNase domains and is tracrRNA independent.
[0704] Slaymaker et al (2016) reported the use of structure-guided protein engineering to improve the specificity of Streptococcus pyogenes Cas9 (SpCas9). The authors developed “enhanced specificity” SpCas9 (eSpCas9) variants which maintained robust on-target cleavage with reduced off-target effects.

[0705] The methods and tools provided herein are exemplified for Cas13, a type II nuclease that does not make use of tracrRNA. Orthologs of Cas13 have been identified in different bacterial species as described herein. Further type II nucleases with similar properties can be identified using methods described in the art (Shmakov et al. 2015, 60:385-397; Abudayeh et al. 2016, Science, 5; 353(6299)). In particular embodiments, such methods for identifying novel CRISPR effector proteins may comprise the steps of selecting sequences from the database encoding a seed which identifies the presence of a CRISPR Cas locus, identifying loci located within 10 kb of the seed comprising Open Reading Frames (ORFs) in the selected sequences, selecting therefrom loci comprising ORFs of which only a single ORF encodes a novel CRISPR effector having greater than 700 amino acids and no more than 90% homology to a known CRISPR effector. In particular embodiments, the seed is a protein that is common to the CRISPR-Cas system, such as Cas1. In further embodiments, the CRISPR array is used as a seed to identify new effector proteins.

[0706] The effectiveness of the present invention has been demonstrated. Preassembled recombinant CRISPR-Cas13 complexes comprising Cas13 and crRNA may be transfected, for example by electroporation, resulting in high mutation rates and absence of detectable off-target mutations. Hur, J. K. et al, Targeted mutagenesis in mice by electroporation of Cas13 ribonucleoproteins, Nat Biotechnol. 2016 Jun. 6. doi: 10.1038/nbt.3596. Genome-wide analyses shows that Cas13 is highly specific. By one measure, in vitro cleavage sites determined for Cas13 in human HEK293T cells were significantly fewer that for SpCas9. Kim, D. et al., Genome-wide analysis reveals specificities of Cas13 endonucleases in human cells, Nat Biotechnol. 2016 Jun. 6. doi: 10.1038/nbt.3609. An efficient multiplexed system employing Cas13 has been demonstrated in Drosophila employing gRNAs processed from an array containing inventing tRNAs. Port, F. et al, Expansion of the CRISPR toolbox in an animal with tRNA-flanked Cas9 and Cas13 gRNAs. doi: http://dx.doi.org/10.1101/046417.

[0707] Also, “Dimeric CRISPR RNA-guided FokI nucleases for highly specific genome editing”, Shengdar Q. Tsai, Nicolas Wyvekens, Cyd Khayter, Jennifer A. Foden, Vishal Thapar, Deepak Reyon, Mathew J. Goodwin, Martin J. Aryee, J. Keith Joung Nature Biotechnology 32(6): 569-77 (2014), relates to dimeric RNA-guided FokI Nucleases that recognize extended sequences and can edit endogenous genes with high efficiencies in human cells.

[0708] With respect to general information on CRISPR/Cas Systems, components thereof, and delivery of such components, including methods, materials, delivery vehicles, vectors, particles, and making and using thereof, including as to amounts and formulations, as well as CRISPR-Cas-expressing eukaryotic cells, CRISPR-Cas expressing eukaryotes, such as a mouse, reference is made to: U.S. Pat. Nos. 8,999,641, 8,993,233, 8,697,359, 8,771,945, 8,795,965, 8,865,406, 8,871,445, 8,889,356, 8,889,418, 8,895,308, 8,906,616, 8,932,814, and 8,945,839; US Patent Publications US 2014-0310830 (U.S. application Ser. No. 14/105,031), US 2014-0287938 A1 (U.S. application Ser. No. 14/213,991), US 2014-0273234 A1 (U.S. application Ser. No. 14/293,674), US2014-0273232 A1 (U.S. application Ser. No. 14/290,575), US 2014-0273231 (U.S. application Ser. No. 14/259,420), US 2014-0256046 A1 (U.S. application Ser. No. 14/226,274), US 2014-0248702 A1 (U.S. application Ser. No. 14/258,458), US 2014-0242700 A1 (U.S. application Ser. No. 14/222,930), US 2014-0242699 A1 (U.S. application Ser. No. 14/183,512), US 2014-0242664 A1 (U.S. application Ser. No. 14/104,990), US 2014-0234972 A1 (U.S. application Ser. No. 14/183,471), US 2014-0227787 A1 (U.S. application Ser. No. 14/256,912), US 2014-0189896 A1 (U.S. application Ser. No. 14/105,035), US 2014-0186958 (U.S. application Ser. No. 14/105,017), US 2014-0186919 A1 (U.S. application Ser. No. 14/104,977), US 2014-0186843 A1 (U.S. application Ser. No. 14/104,900), US 2014-0179770 A1 (U.S. application Ser. No. 14/104,837) and US 2014-0179006 A1 (U.S. application Ser. No. 14/183,486), US 2014-0170753 (U.S. application Ser. No. 14/183,429); US 2015-0184139 (U.S. application Ser. No. 14/324,960); Ser. No. 14/054,414 European Patent Applications EP 2 771 468 (EP13818570.7), EP 2 764 103 (EP13824232.6), and EP 2 784 162 (EP14170383.5); and PCT Patent Publications WO2014/093661 (PCT/US2013/074743), WO2014/093694 (PCT/US2013/074790), WO2014/093595 (PCT/US2013/074611), WO2014/093718 (PCT/US2013/074825), WO2014/093709 (PCT/US2013/074812), WO2014/093622 (PCT/US2013/074667), WO2014/093635 (PCT/US2013/074691), WO2014/093655 (PCT/US2013/074736), WO2014/093712 (PCT/US2013/074819), WO2014/093701 (PCT/US2013/074800), WO2014/018423 (PCT/US2013/051418), WO2014/204723 (PCT/US2014/041790), WO2014/204724 (PCT/US2014/041800), WO2014/204725 (PCT/US2014/041803), WO2014/204726 (PCT/US2014/041804), WO2014/204727 (PCT/US2014/041806), WO2014/204728 (PCT/US2014/041808), WO2014/204729 (PCT/US2014/041809), WO2015/089351 (PCT/US2014/069897), WO2015/089354 (PCT/US2014/069902), WO2015/089364 (PCT/US2014/069925), WO2015/089427 (PCT/US2014/070068), WO2015/089462 (PCT/US2014/070127), WO2015/089419 (PCT/US2014/070057), WO2015/089465 (PCT/US2014/070135), WO2015/089486 (PCT/US2014/070175), WO2015/058052 (PCT/US2014/061077), WO2015/070083 (PCT/US2014/064663), WO2015/089354 (PCT/US2014/069902), WO2015/089351 (PCT/US2014/069897), WO2015/089364 (PCT/US2014/069925), WO2015/089427 (PCT/US2014/070068), WO2015/089473 (PCT/US2014/070152), WO2015/089486 (PCT/US2014/070175), WO2016/049258 (PCT/US2015/051830), WO2016/094867 (PCT/US2015/065385), WO2016/094872 (PCT/US2015/065393), WO2016/094874 (PCT/US2015/065396), WO2016/106244 (PCT/US2015/067177).

[0709] Mention is also made of U.S. application 62/180,709, 17 Jun. 2015, PROTECTED GUIDE RNAS (PGRNAS); U.S. application 62/091,455, filed, 12 Dec. 2014, PROTECTED GUIDE RNAS (PGRNAS); U.S. application 62/096,708, 24 Dec. 2014, PROTECTED GUIDE RNAS (PGRNAS); U.S. applications 62/091,462, 12 Dec. 2014, 62/096,324, 23 Dec. 2014, 62/180,681, 17 Jun. 2015, and 62/237,496, 5 Oct. 2015, DEAD GUIDES FOR CRISPR TRANSCRIPTION FACTORS; U.S. application 62/091,456, 12 Dec. 2014 and 62/180,692, 17 Jun. 2015, ESCORTED AND FUNCTIONALIZED GUIDES FOR CRISPR-CAS SYSTEMS; U.S. application 62/091,461, 12 Dec. 2014, DELIVERY, USE AND THERAPEUTIC APPLICATIONS OF THE CRISPR-CAS SYSTEMS AND COMPOSITIONS FOR GENOME EDITING AS TO HEMATOPOETIC STEM CELLS (HSCs); U.S. application 62/094,903,19 Dec. 2014, UNBIASED IDENTIFICATION OF DOUBLE-STRAND BREAKS AND GENOMIC REARRANGEMENT BY GENOME-WISE INSERT CAPTURE SEQUENCING; U.S. application 62/096,761, 24 Dec. 2014, ENGINEERING OF SYSTEMS, METHODS AND OPTIMIZED ENZYME AND GUIDE SCAFFOLDS FOR SEQUENCE MANIPULATION; U.S. application 62/098,059, 30 Dec. 2014, 62/181,641, 18 Jun. 2015, and 62/181,667,18 Jun. 2015, RNA-TARGETING SYSTEM; U.S. application 62/096,656, 24 Dec. 2014 and 62/181,151, 17 Jun. 2015, CRISPR HAVING OR ASSOCIATED WITH DESTABILIZATION DOMAINS; U.S. application 62/096,697,24 Dec. 2014, CRISPR HAVING OR ASSOCIATED WITH AAV; U.S. application 62/098,158, 30 Dec. 2014, ENGINEERED CRISPR COMPLEX INSERTIONAL TARGETING SYSTEMS; U.S. application 62/151,052, 22 Apr. 2015, CELLULAR TARGETING FOR EXTRACELLULAR EXOSOMAL REPORTING; U.S. application 62/054,490, 24 Sep. 2014, DELIVERY, USE AND THERAPEUTIC APPLICATIONS OF THE CRISPR-CAS SYSTEMS AND COMPOSITIONS FOR TARGETING DISORDERS AND DISEASES USING PARTICLE DELIVERY COMPONENTS; U.S. application 61/939,154,12-F EB-14, SYSTEMS, METHODS AND COMPOSITIONS FOR SEQUENCE MANIPULATION WITH OPTIMIZED FUNCTIONAL CRISPR-CAS SYSTEMS; U.S. application 62/055,484, 25 Sep. 2014, SYSTEMS, METHODS AND COMPOSITIONS FOR SEQUENCE MANIPULATION WITH OPTIMIZED FUNCTIONAL CRISPR-CAS SYSTEMS; U.S. application 62/087,537, 4 Dec. 2014, SYSTEMS, METHODS AND COMPOSITIONS FOR SEQUENCE MANIPULATION WITH OPTIMIZED FUNCTIONAL CRISPR-CAS SYSTEMS; U.S. application 62/054,651, 24 Sep. 2014, DELIVERY, USE AND THERAPEUTIC APPLICATIONS OF THE CRISPR-CAS SYSTEMS AND COMPOSITIONS FOR MODELING COMPETITION OF MULTIPLE CANCER MUTATIONS IN VIVO; U.S. application 62/067,886, 23 Oct. 2014, DELIVERY, USE AND THERAPEUTIC APPLICATIONS OF THE CRISPR-CAS SYSTEMS AND COMPOSITIONS FOR MODELING COMPETITION OF MULTIPLE CANCER MUTATIONS IN VIVO; U.S. applications 62/054,675, 24 Sep. 2014 and 62/181,002, 17 Jun. 2015, DELIVERY, USE AND THERAPEUTIC APPLICATIONS OF THE CRISPR-CAS SYSTEMS AND COMPOSITIONS IN NEURONAL CELLS/TISSUES; U.S. application 62/054,528, 24 Sep. 2014, DELIVERY, USE AND THERAPEUTIC APPLICATIONS OF THE CRISPR-CAS SYSTEMS AND COMPOSITIONS IN IMMUNE DISEASES OR DISORDERS; U.S. application 62/055,454, 25 Sep. 2014, DELIVERY, USE AND THERAPEUTIC APPLICATIONS OF THE CRISPR-CAS SYSTEMS AND COMPOSITIONS FOR TARGETING DISORDERS AND DISEASES USING CELL PENETRATION PEPTIDES (CPP); U.S. application 62/055,460, 25 Sep. 2014, MULTIFUNCTIONAL-CRISPR COMPLEXES AND/OR OPTIMIZED ENZYME LINKED FUNCTIONAL-CRISPR COMPLEXES; U.S. application 62/087,475, 4 Dec. 2014 and 62/181,690, 18 Jun. 2015, FUNCTIONAL SCREENING WITH OPTIMIZED FUNCTIONAL CRISPR-CAS SYSTEMS; U.S. application 62/055,487, 25 Sep. 2014, FUNCTIONAL SCREENING WITH OPTIMIZED FUNCTIONAL CRISPR-CAS SYSTEMS; U.S. application 62/087,546, 4 Dec. 2014 and 62/181,687,18 Jun. 2015, MULTIFUNCTIONAL CRISPR COMPLEXES AND/OR OPTIMIZED ENZYME LINKED FUNCTIONAL-CRISPR COMPLEXES; and U.S. application 62/098,285, 30 Dec. 2014, CRISPR MEDIATED IN VIVO MODELING AND GENETIC SCREENING OF TUMOR GROWTH AND METASTASIS.

[0710] Mention is made of U.S. applications 62/181,659, 18 Jun. 2015 and 62/207,318, 19 Aug. 2015, ENGINEERING AND OPTIMIZATION OF SYSTEMS, METHODS, ENZYME AND GUIDE SCAFFOLDS OF CAS9 ORTHOLOGS AND VARIANTS FOR SEQUENCE MANIPULATION. Mention is made of U.S. applications 62/181,663, 18 Jun. 2015 and 62/245,264, 22 Oct. 2015, NOVEL CRISPR ENZYMES AND SYSTEMS, U.S. applications 62/181,675, 18 Jun. 2015, 62/285,349, 22 Oct. 2015, 62/296,522, 17 Feb. 2016, and 62/320,231, 8 Apr. 2016, NOVEL CRISPR ENZYMES AND SYSTEMS, U.S. application 62/232,067, 24 Sep. 2015, U.S. application Ser. No. 14/975,085, 18 Dec. 2015, European application No. 16150428.7, U.S. application 62/205,733, 16 Aug. 2015, U.S. application 62/201,542, 5 Aug. 2015, U.S. application 62/193,507, 16 Jul. 2015, and U.S. application 62/181,739, 18 Jun. 2015, each entitled NOVEL CRISPR ENZYMES AND SYSTEMS and of U.S. application 62/245,270, 22 Oct. 2015, NOVEL CRISPR ENZYMES AND SYSTEMS. Mention is also made of U.S. application 61/939,256, 12 Feb. 2014, and WO 2015/089473 (PCT/US2014/070152), 12 Dec. 2014, each entitled ENGINEERING OF SYSTEMS, METHODS AND OPTIMIZED GUIDE COMPOSITIONS WITH NEW ARCHITECTURES FOR SEQUENCE MANIPULATION. Mention is also made of PCT/US2015/045504, 15 Aug. 2015, U.S. application 62/180,699, 17 Jun. 2015, and U.S. application 62/038,358, 17 Aug. 2014, each entitled GENOME EDITING USING CAS9 NICKASES.

[0711] Each of these patents, patent publications, and applications, and all documents cited therein or during their prosecution (“appln cited documents”) and all documents cited or referenced in the appln cited documents, together with any instructions, descriptions, product specifications, and product sheets for any products mentioned therein or in any document therein and incorporated by reference herein, are hereby incorporated herein by reference, and may be employed in the practice of the invention. All documents (e.g., these patents, patent publications and applications and the appln cited documents) are incorporated herein by reference to the same extent as if each individual document was specifically and individually indicated to be incorporated by reference.

### Type-V CRISPR-Cas Protein

[0712] The application describes methods using Type-V CRISPR-Cas proteins. This is exemplified herein with Cas13, whereby a number of orthologs or homologs have been identified. It will be apparent to the skilled person that further orthologs or homologs can be identified and that any of the functionalities described herein may be engineered into other orthologs, including chimeric enzymes comprising fragments from multiple orthologs.

[0713] Computational methods of identifying novel CRISPR-Cas loci are described in EP3009511 or US2016208243 and may comprise the following steps: detecting all contigs encoding the Cas1 protein; identifying all predicted protein coding genes within 20 kB of the cas1 gene; comparing the identified genes with Cas protein-specific profiles and predicting CRISPR arrays; selecting unclassified candidate CRISPR-Cas loci containing proteins larger than 500 amino acids (>500 aa); analyzing selected candidates using methods such as PSI-BLAST and HHPred to screen for known protein domains, thereby identifying novel Class 2 CRISPR-Cas loci (see also Schmakov et al. 2015, Mol Cell. 60(3):385-97). In addition to the above mentioned steps, additional analysis of the candidates may be conducted by searching metagenomics databases for additional homologs. Additionally or alternatively, to expand the search to non-autonomous CRISPR-Cas systems, the same procedure can be performed with the CRISPR array used as the seed.

[0714] In one aspect the detecting all contigs encoding the Cas1 protein is performed by GenemarkS which a gene prediction program as further described in “GeneMarkS: a self-training method for prediction of gene starts in microbial genomes. Implications for finding sequence motifs in regulatory regions.” John Besemer, Alexandre Lomsadze and Mark Borodovsky, Nucleic Acids Research (2001) 29, pp 2607-2618, herein incorporated by reference.

[0715] In one aspect the identifying all predicted protein coding genes is carried out by comparing the identified genes with Cas protein-specific profiles and annotating them according to NCBI Conserved Domain Database (CDD) which is a protein annotation resource that consists of a collection of well-annotated multiple sequence alignment models for ancient domains and full-length proteins. These are available as position-specific score matrices (PSSMs) for fast identification of conserved domains in protein sequences via RPS-BLAST. CDD content includes NCBI-curated domains, which use 3D-structure information to explicitly define domain boundaries and provide insights into sequence/structure/function relationships, as well as domain models imported from a number of external source databases (Pfam, SMART, COG, PRK, TIGRFAM). In a further aspect, CRISPR arrays were predicted using a PILER-CR program which is a public domain software for finding CRISPR repeats as described in “PILER-CR: fast and accurate identification of CRISPR repeats”, Edgar, R. C., BMC Bioinformatics, January 20; 8:18(2007), herein incorporated by reference.

[0716] In a further aspect, the case by case analysis is performed using PSI-BLAST (Position-Specific Iterative Basic Local Alignment Search Tool). PSI-BLAST derives a position-specific scoring matrix (PSSM) or profile from the multiple sequence alignment of sequences detected above a given score threshold using protein-protein BLAST. This PSSM is used to further search the database for new matches, and is updated for subsequent iterations with these newly detected sequences. Thus, PSI-BLAST provides a means of detecting distant relationships between proteins.

[0717] In another aspect, the case by case analysis is performed using HHpred, a method for sequence database searching and structure prediction that is as easy to use as BLAST or PSI-BLAST and that is at the same time much more sensitive in finding remote homologs. In fact, HHpred's sensitivity is competitive with the most powerful servers for structure prediction currently available. HHpred is the first server that is based on the pairwise comparison of profile hidden Markov models (HMMs). Whereas most conventional sequence search methods search sequence databases such as UniProt or the NR, HHpred searches alignment databases, like Pfam or SMART. This greatly simplifies the list of hits to a number of sequence families instead of a clutter of single sequences. All major publicly available profile and alignment databases are available through HHpred. HHpred accepts a single query sequence or a multiple alignment as input. Within only a few minutes it returns the search results in an easy-to-read format similar to that of PSI-BLAST. Search options include local or global alignment and scoring secondary structure similarity. HHpred can produce pairwise query-template sequence alignments, merged query-template multiple alignments (e.g. for transitive searches), as well as 3D structural models calculated by the MODELLER software from HHpred alignments.

[0718] Orthologs of Cas13

[0719] The terms “orthologue” (also referred to as “ortholog” herein) and “homologue” (also referred to as “homolog” herein) are well known in the art. By means of further guidance, a “homologue” of a protein as used herein is a protein of the same species which performs the same or a similar function as the protein it is a homologue of. Homologous proteins may but need not be structurally related, or are only partially structurally related. An “orthologue” of a protein as used herein is a protein of a different species which performs the same or a similar function as the protein it is an orthologue of. Orthologous proteins may but need not be structurally related, or are only partially structurally related. Homologs and orthologs may be identified by homology modelling (see, e.g., Greer, Science vol. 228 (1985) 1055, and Blundell et al. Eur J Biochem vol 172 (1988), 513) or “structural BLAST” (Dey F, Cliff Zhang Q, Petrey D, Honig B. Toward a “structural BLAST”: using structural relationships to infer function. Protein Sci. 2013 April; 22(4):359-66. doi: 10.1002/pro.2225.). See also Shmakov et al. (2015) for application in the field of CRISPR-Cas loci. Homologous proteins may but need not be structurally related, or are only partially structurally related.

[0720] The Cas13 gene is found in several diverse bacterial genomes, typically in the same locus with cas1, cas2, and cas4 genes and a CRISPR cassette (for example, FNFX1_1431-FNFX1_1428 of Francisella cf. novicida Fx1). Thus, the layout of this putative novel CRISPR-Cas system appears to be similar to that of type II-B. Furthermore, similar to Cas9, the Cas13 protein contains a readily identifiable C-terminal region that is homologous to the transposon ORF-B and includes an active RuvC-like nuclease, an arginine-rich region, and a Zn finger (absent in Cas9). However, unlike Cas9, Cas13 is also present in several genomes without a CRISPR-Cas context and its relatively high similarity with ORF-B suggests that it might be a transposon component. It was suggested that if this was a genuine CRISPR-Cas system and Cas13 is a functional analog of Cas9 it would be a novel CRISPR-Cas type, namely type V (See Annotation and Classification of CRISPR-Cas Systems. Makarova K S, Koonin E V. Methods Mol Biol. 2015; 1311:47-75). However, as described herein, Cas13 is denoted to be in subtype V-A to distinguish it from C2c1p which does not have an identical domain structure and is hence denoted to be in subtype V-B.

[0721] The present invention encompasses the use of a Cas13 effector protein, derived from a Cas13 locus denoted as subtype V-A. Herein such effector proteins are also referred to as “Cas13p”, e.g., a Cas13 protein (and such effector protein or Cas13 protein or protein derived from a Cas13 locus is also called “CRISPR-Cas protein”).

[0722] In particular embodiments, the effector protein is a Cas13 effector protein from an organism from a genus comprising Streptococcus, Campylobacter, Nitratifractor, Staphylococcus, Parvibaculum, Roseburia, Neisseria, Gluconacetobacter, Azospirillum, Sphaerochaeta, Lactobacillus, Eubacterium, Corynebacter, Carnobacterium, Rhodobacter, Listeria, Paludibacter, Clostridium, Lachnospiraceae, Clostridiaridium, Leptotrichia, Francisella, Legionella, Alicyclobacillus, Methanomethyophilus, Porphyromonas, Prevotella, Bacteroidetes, Helcococcus, Leptospira, Desulfovibrio, Desulfonatronum, Opitutaceae, Tuberibacillus, Bacillus, Brevibacilus, Methylobacterium, Butyvibrio, Perigrinibacterium, Pareubacterium, Moraxella, Thiomicrospira or Acidaminococcus. In particular embodiments, the Cas13 effector protein is selected from an organism from a genus selected from Eubacterium, Lachnospiraceae, Leptotrichia, Francisella, Methanomethyophilus, Porphyromonas, Prevotella, Leptospira, Butyvibrio, Perigrinibacterium, Pareubacterium, Moraxella, Thiomicrospira or Acidaminococcus

[0723] In further particular embodiments, the Cas13 effector protein is from an organism selected from S. mutans, S. agalactiae, S. equisimilis, S. sanguinis, S. pneumonia; C. jejuni, C. coli; N. salsuginis, N. tergarcus; S. auricularis, S. carnosus; N. meningitides, N. gonorrhoeae; L. monocytogenes, L. ivanovii; C. botulinum, C. difficile, C. tetani, C. sordellii, L inadai, F. tularensis 1, P. albensis, L. bacterium, B. proteoclasticus, P. bacterium, P. crevioricanis, P. disiens and P. macacae.

[0724] The effector protein may comprise a chimeric effector protein comprising a first fragment from a first effector protein (e.g., a Cas13) ortholog and a second fragment from a second effector (e.g., a Cas13) protein ortholog, and wherein the first and second effector protein orthologs are different. At least one of the first and second effector protein (e.g., a Cas13) orthologs may comprise an effector protein (e.g., a Cas13) from an organism comprising Streptococcus, Campylobacter, Nitratifractor, Staphylococcus, Parvibaculum, Roseburia, Neisseria, Gluconacetobacter, Azospirillum, Sphaerochaeta, Lactobacillus, Eubacterium, Corynebacter, Carnobacterium, Rhodobacter, Listeria, Paludibacter, Clostridium, Lachnospiraceae, Clostridiaridium, Leptotrichia, Francisella, Legionella, Alicyclobacillus, Methanomethyophilus, Porphyromonas, Prevotella, Bacteroidetes, Helcococcus, Letospira, Desulfovibrio, Desulfonatronum, Opitutaceae, Tuberibacillus, Bacillus, Brevibacilus, Methylobacterium, Butyvibrio, Perigrinibacterium, Pareubacterium, Moraxella, Thiomicrospira or Acidaminococcus; e.g., a chimeric effector protein comprising a first fragment and a second fragment wherein each of the first and second fragments is selected from a Cas13 of an organism comprising Streptococcus, Campylobacter, Nitratifractor, Staphylococcus, Parvibaculum, Roseburia, Neisseria, Gluconacetobacter, Azospirillum, Sphaerochaeta, Lactobacillus, Eubacterium, Corynebacter, Carnobacterium, Rhodobacter, Listeria, Paludibacter, Clostridium, Lachnospiraceae, Clostridiaridium, Leptotrichia, Francisella, Legionella, Alicyclobacillus, Methanomethyophilus, Porphyromonas, Prevotella, Bacteroidetes, Helcococcus, Letospira, Desulfovibrio, Desulfonatronum, Opitutaceae, Tuberibacillus, Bacillus, Brevibacilus, Methylobacterium, Butyvibrio, Perigrinibacterium, Pareubacterium, Moraxella, Thiomicrospira or Acidaminococcus wherein the first and second fragments are not from the same bacteria; for instance a chimeric effector protein comprising a first fragment and a second fragment wherein each of the first and second fragments is selected from a Cas13 of S. mutans, S. agalactiae, S. equisimilis, S. sanguinis, S. pneumonia; C. jejuni, C. coli; N. salsuginis, N. tergarcus; S. auricularis, S. carnosus; N. meningitides, N. gonorrhoeae; L. monocytogenes, L. ivanovii; C. botulinum, C. difficile, C. tetani, C. sordellii; Francisella tularensis 1, Prevotella albensis, Lachnospiraceae bacterium MC2017 1, Butyrivibrio proteoclasticus, Peregrinibacteria bacterium GW2011_GWA2_33_10, Parcubacteria bacterium GW2011_GWC2_44_17, Smithella sp. SCADC, Acidaminococcus sp. BV3L6, Lachnospiraceae bacterium MA2020, Candidatus Methanoplasma termitum, Eubacterium eligens, Moraxella bovoculi 237, Leptospira inadai, Lachnospiraceae bacterium ND2006, Porphyromonas crevioricanis 3, Prevotella disiens and Porphyromonas macacae, wherein the first and second fragments are not from the same bacteria.

[0725] In a more preferred embodiment, the Cas13p is derived from a bacterial species selected from Francisella tularensis 1, Prevotella albensis, Lachnospiraceae bacterium MC2017 1, Butyrivibrio proteoclasticus, Peregrinibacteria bacterium GW2011_GWA2_33_10, Parcubacteria bacterium GW2011_GWC2_44_17, Smithella sp. SCADC, Acidaminococcus sp. BV3L6, Lachnospiraceae bacterium MA2020, Candidatus Methanoplasma termitum, Eubacterium eligens, Moraxella bovoculi 237, Moraxella bovoculi AAX08_00205, Moraxella bovoculi AAX11_00205, Butyrivibrio sp. NC3005, Thiomicrospira sp. XS5, Leptospira inadai, Lachnospiraceae bacterium ND2006, Porphyromonas crevioricanis 3, Prevotella disiens and Porphyromonas macacae. In certain embodiments, the Cas13p is derived from a bacterial species selected from Acidaminococcus sp. BV3L6, Lachnospiraceae bacterium MA2020. In certain embodiments, the effector protein is derived from a subspecies of Francisella tularensis 1, including but not limited to Francisella tularensis subsp. Novicida. In certain preferred embodiments, the Cas13p is derived from a bacterial species selected from Acidaminococcus sp. BV3L6, Lachnospiraceae bacterium ND2006, Lachnospiraceae bacterium MA2020, Moraxella bovoculi AAX08_00205, Moraxella bovoculi AAX11_00205, Butyrivibrio sp. NC3005, or Thiomicrospira sp. XS5.

[0726] In particular embodiments, the homologue or orthologue of Cas13 as referred to herein has a sequence homology or identity of at least 80%, more preferably at least 85%, even more preferably at least 90%, such as for instance at least 95% with the example Cas13 proteins disclosed herein. In further embodiments, the homologue or orthologue of Cas13 as referred to herein has a sequence identity of at least 80%, more preferably at least 85%, even more preferably at least 90%, such as for instance at least 95% with the wild type Cas13. Where the Cas13 has one or more mutations (mutated), the homologue or orthologue of said Cas13 as referred to herein has a sequence identity of at least 80%, more preferably at least 85%, even more preferably at least 90%, such as for instance at least 95% with the mutated Cas13.

[0727] In an embodiment, the Cas13 protein may be an ortholog of an organism of a genus which includes, but is not limited to Acidaminococcus sp, Lachnospiraceae bacterium or Moraxella bovoculi; in particular embodiments, the type V Cas protein may be an ortholog of an organism of a species which includes, but is not limited to Acidaminococcus sp. BV3L6; Lachnospiraceae bacterium ND2006 (LbCas13) or Moraxella bovoculi 237. In particular embodiments, the homologue or orthologue of Cas13 as referred to herein has a sequence homology or identity of at least 80%, more preferably at least 85%, even more preferably at least 90%, such as for instance at least 95% with one or more of the Cas13 sequences disclosed herein. In further embodiments, the homologue or orthologue of Cas13 as referred to herein has a sequence identity of at least 80%, more preferably at least 85%, even more preferably at least 90%, such as for instance at least 95% with the wild type FnCas13, AsCas13 or LbCas13.

[0728] In particular embodiments, the Cas13 protein of the invention has a sequence homology or identity of at least 60%, more particularly at least 70, such as at least 80%, more preferably at least 85%, even more preferably at least 90%, such as for instance at least 95% with FnCas13, AsCas13 or LbCas13. In further embodiments, the Cas13 protein as referred to herein has a sequence identity of at least 60%, such as at least 70%, more particularly at least 80%, more preferably at least 85%, even more preferably at least 90%, such as for instance at least 95% with the wild type AsCas13 or LbCas13. In particular embodiments, the Cas13 protein of the present invention has less than 60% sequence identity with FnCas13. The skilled person will understand that this includes truncated forms of the Cas13 protein whereby the sequence identity is determined over the length of the truncated form. In particular embodiments, the Cas13 enzyme is not FnCas13.

[0729] Modified Cas13 Enzymes

[0730] In particular embodiments, it is of interest to make use of an engineered Cas13 protein as defined herein, such as Cas13, wherein the protein complexes with a nucleic acid molecule comprising RNA to form a CRISPR complex, wherein when in the CRISPR complex, the nucleic acid molecule targets one or more target polynucleotide loci, the protein comprises at least one modification compared to unmodified Cas13 protein, and wherein the CRISPR complex comprising the modified protein has altered activity as compared to the complex comprising the unmodified Cas13 protein. It is to be understood that when referring herein to CRISPR “protein”, the Cas13 protein preferably is a modified CRISPR-Cas protein (e.g. having increased or decreased (or no) enzymatic activity, such as without limitation including Cas13. The term “CRISPR protein” may be used interchangeably with “CRISPR-Cas protein”, irrespective of whether the CRISPR protein has altered, such as increased or decreased (or no) enzymatic activity, compared to the wild type CRISPR protein.

[0731] Computational analysis of the primary structure of Cas13 nucleases reveals three distinct regions. First a C-terminal RuvC like domain, which is the only functional characterized domain. Second a N-terminal alpha-helical region and thirst a mixed alpha and beta region, located between the RuvC like domain and the alpha-helical region.

[0732] Several small stretches of unstructured regions are predicted within the Cas13 primary structure. Unstructured regions, which are exposed to the solvent and not conserved within different Cas13 orthologs, are preferred sides for splits and insertions of small protein sequences. In addition, these sides can be used to generate chimeric proteins between Cas13 orthologs.

[0733] Based on the above information, mutants can be generated which lead to inactivation of the enzyme or which modify the double strand nuclease to nickase activity. In alternative embodiments, this information is used to develop enzymes with reduced off-target effects (described elsewhere herein)

[0734] In certain of the above-described Cas13 enzymes, the enzyme is modified by mutation of one or more residues (in the RuvC domain) including but not limited to positions R909, R912, R930, R947, K949, R951, R955, K965, K968, K1000, K1002, R1003, K1009, K1017, K1022, K1029, K1035, K1054, K1072, K1086, R1094, K1095, K1109, K1118, K1142, K1150, K1158, K1159, R1220, R1226, R1242, and/or R1252 with reference to amino acid position numbering of AsCas13 (Acidaminococcus sp. BV3L6). In certain embodiments, the Cas13 enzymes comprising said one or more mutations have modified, more preferably increased specificity for the target.

[0735] In certain of the above-described non-naturally-occurring CRISPR-Cas proteins, the enzyme is modified by mutation of one or more residues (in the RAD50) domain including but not limited positions K324, K335, K337, R331, K369, K370, R386, R392, R393, K400, K404, K406, K408, K414, K429, K436, K438, K459, K460, K464, R670, K675, R681, K686, K689, R699, K705, R725, K729, K739, K748, and/or K752 with reference to amino acid position numbering of AsCas13 (Acidaminococcus sp. BV3L6). In certain embodiments, the Cas13 enzymes comprising said one or more mutations have modified, more preferably increased specificity for the target.

[0736] In certain of the Cas13 enzymes, the enzyme is modified by mutation of one or more residues including but not limited positions R912, T923, R947, K949, R951, R955, K965, K968, K1000, R1003, K1009, K1017, K1022, K1029, K1072, K1086, F1103, R1226, and/or R1252 with reference to amino acid position numbering of AsCas13 (Acidaminococcus sp. BV3L6). In certain embodiments, the Cas13 enzymes comprising said one or more mutations have modified, more preferably increased specificity for the target.

[0737] In certain embodiments, the Cas13 enzyme is modified by mutation of one or more residues including but not limited positions R833, R836, K847, K879, K881, R883, R887, K897, K900, K932, R935, K940, K948, K953, K960, K984, K1003, K1017, R1033, R1138, R1165, and/or R1252 with reference to amino acid position numbering of LbCas13 (Lachnospiraceae bacterium ND2006). In certain embodiments, the Cas13 enzymes comprising said one or more mutations have modified, more preferably increased specificity for the target.

[0738] In certain embodiments, the Cas13 enzyme is modified by mutation of one or more residues including but not limited positions K15, R18, K26, Q34, R43, K48, K51, R56, R84, K85, K87, N93, R103, N104, T118, K123, K134, R176, K177, R192, K200, K226, K273, K275, T291, R301, K307, K369, S404, V409, K414, K436, K438, K468, D482, K516, R518, K524, K530, K532, K548, K559, K570, R574, K592, D596, K603, K607, K613, C647, R681, K686, H720, K739, K748, K757, T766, K780, R790, P791, K796, K809, K815, T816, K860, R862, R863, K868, K897, R909, R912, T923, R947, K949, R951, R955, K965, K968, K1000, R1003, K1009, K1017, K1022, K1029, A1053, K1072, K1086, F1103, S1209, R1226, R1252, K1273, K1282, and/or K1288 with reference to amino acid position numbering of AsCas13 (Acidaminococcus sp. BV3L6). In certain embodiments, the Cas13 enzymes comprising said one or more mutations have modified, more preferably increased specificity for the target.

[0739] In certain embodiments, the enzyme is modified by mutation of one or more residues including but not limited positions K15, R18, K26, R34, R43, K48, K51, K56, K87, K88, D90, K96, K106, K107, K120, Q125, K143, R186, K187, R202, K210, K235, K296, K298, K314, K320, K326, K397, K444, K449, E454, A483, E491, K527, K541, K581, R583, K589, K595, K597, K613, K624, K635, K639, K656, K660, K667, K671, K677, K719, K725, K730, K763, K782, K791, R800, K809, K823, R833, K834, K839, K852, K858, K859, K869, K871, R872, K877, K905, R918, R921, K932, I960, K962, R964, R968, K978, K981, K1013, R1016, K1021, K1029, K1034, K1041, K1065, K1084, and/or K1098 with reference to amino acid position numbering of FnCas13 (Francisella novicida U112). In certain embodiments, the Cas13 enzymes comprising said one or more mutations have modified, more preferably increased specificity for the target.

[0740] In certain embodiments, the enzyme is modified by mutation of one or more residues including but not limited positions K15, R18, K26, K34, R43, K48, K51, R56, K83, K84, R86, K92, R102, K103, K116, K121, R158, E159, R174, R182, K206, K251, K253, K269, K271, K278, P342, K380, R385, K390, K415, K421, K457, K471, A506, R508, K514, K520, K522, K538, Y548, K560, K564, K580, K584, K591, K595, K601, K634, K640, R645, K679, K689, K707, T716, K725, R737, R747, R748, K753, K768, K774, K775, K785, K787, R788, Q793, K821, R833, R836, K847, K879, K881, R883, R887, K897, K900, K932, R935, K940, K948, K953, K960, K984, K1003, K1017, R1033, K1121, R1138, R1165, K1190, K1199, and/or K1208 with reference to amino acid position numbering of LbCas13 (Lachnospiraceae bacterium ND2006). In certain embodiments, the Cas13 enzymes comprising said one or more mutations have modified, more preferably increased specificity for the target.

[0741] In certain embodiments, the enzyme is modified by mutation of one or more residues including but not limited positions K14, R17, R25, K33, M42, Q47, K50, D55, K85, N86, K88, K94, R104, K105, K118, K123, K131, R174, K175, R190, R198, I221, K267, Q269, K285, K291, K297, K357, K403, K409, K414, K448, K460, K501, K515, K550, R552, K558, K564, K566, K582, K593, K604, K608, K623, K627, K633, K637, E643, K780, Y787, K792, K830, Q846, K858, K867, K876, K890, R900, K901, M906, K921, K927, K928, K937, K939, R940, K945, Q975, R987, R990, K1001, R1034, 11036, R1038, R1042, K1052, K1055, K1087, R1090, K1095, N1103, K1108, K1115, K1139, K1158, R1172, K1188, K1276, R1293, A1319, K1340, K1349, and/or K1356 with reference to amino acid position numbering of MbCas13 (Moraxella bovoculi 237). In certain embodiments, the Cas13 enzymes comprising said one or more mutations have modified, more preferably increased specificity for the target.

[0742] In one embodiment, the Cas13 protein is modified with a mutation at S1228 (e.g., S1228A) with reference to amino acid position numbering of AsCas13. See Yamano et al., Cell 165:949-962 (2016), which is incorporated herein by reference in its entirety.

[0743] In certain embodiments, the Cas13 protein has been modified to recognize a non-natural PAM, such as recognizing a PAM having a sequence or comprising a sequence YCN, YCV, AYV, TYV, RYN, RCN, TGYV, NTTN, TTN, TRTN, TYTV, TYCT, TYCN, TRTN, NTTN, TACT, TYCC, TRTC, TATV, NTTV, TTV, TSTG, TVTS, TYYS, TCYS, TBYS, TCYS, TNYS, TYYS, TNTN, TSTG, TTCC, TCCC, TATC, TGTG, TCTG, TYCV, or TCTC. In particular embodiments, said mutated Cas13 comprises one or more mutated amino acid residue at position 11, 12, 13, 14, 15, 16, 17, 34, 36, 39, 40, 43, 46, 47, 50, 54, 57, 58, 111, 126, 127, 128, 129, 130, 131, 132, 133, 134, 135, 136, 157, 158, 159, 160, 161, 162, 163, 164, 165, 166, 167, 168, 169, 170, 171, 172, 173, 174, 175, 176, 177, 178, 532, 533, 534, 535, 536, 537, 538, 539, 540, 541, 542, 543, 544, 545, 546, 547, 548, 549, 550, 551, 552, 553, 554, 555, 556, 565, 566, 567, 568, 569, 570, 571, 572, 573, 574, 575, 592, 593, 594, 595, 596, 597, 598, 599, 600, 601, 602, 603, 604, 605, 606, 607, 608, 609, 610, 611, 612, 613, 614, 615, 616, 617, 618, 619, 620, 626, 627, 628, 629, 630, 631, 632, 633, 634, 635, 636, 637, 638, 642, 643, 644, 645, 646, 647, 648, 649, 651, 652, 653, 654, 655, 656, 676, 679, 680, 682, 683, 684, 685, 686, 687, 688, 689, 690, 691, 692, 693, 707, 711, 714, 715, 716, 717, 718, 719, 720, 721, 722, 739, 765, 768, 769, 773, 777, 778, 779, 780, 781, 782, 783, 784, 785, 786, 871, 872, 873, 874, 875, 876, 877, 878, 879, 880, 881, 882, 883, 884, or 1048 of AsCas13 or a position corresponding thereto in a Cas13 ortholog; preferably, one or more mutated amino acid residue at position 130, 131, 132, 133, 134, 135, 136, 162, 163, 164, 165, 166, 167, 168, 169, 170, 171, 172, 173, 174, 175, 176, 177, 536, 537, 538, 539, 540, 541, 542, 543, 544, 545, 546, 547, 548, 549, 550, 551, 552, 570, 571, 572, 573, 595, 596, 597, 598, 599, 600, 601, 602, 603, 604, 605, 606, 607, 608, 609, 610, 611, 612, 613, 614, 615, 630, 631, 632, 646, 647, 648, 649, 650, 651, 652, 653, 683, 684, 685, 686, 687, 688, 689, or 690;

[0744] In certain embodiments, the Cas13 protein is modified to have increased activity, i.e. wider PAM specificity. In particular embodiments, the Cas13 protein is modified by mutation of one or more residues including but not limited positions 539, 542, 547, 548, 550, 551, 552, 167, 604, and/or 607 of AsCas13, or the corresponding position of an AsCas13 orthologue, homologue, or variant, preferably mutated amino acid residues at positions 542 or 542 and 607, wherein said mutations preferably are 542R and 607R, such as S542R and K607R; or preferably mutated amino acid residues at positions 542 and 548 (and optionally 552), wherein said mutations preferably are 542R and 548V (and optionally 552R), such as S542R and K548V (and optionally N552R); or at position 532, 538, 542, and/or 595 of LbCas13, or the corresponding position of an AsCas13 orthologue, homologue, or variant, preferably mutated amino acid residues at positions 532 or 532 and 595, wherein said mutations preferably are 532R and 595R, such as G532R and K595R; or preferably mutated amino acid residues at positions 532 and 538 (and optionally 542), wherein said mutations preferably are 532R and 538V (and optionally 542R), such as G532R and K538V (and optionally Y542R), most preferably wherein said mutations are S542R and K607R, S542R and K548V, or S542R, K548V and N552R of AsCas13.

[0745] Deactivated/Inactivated Cas13 Protein

[0746] Where the Cas13 protein has nuclease activity, the Cas13 protein may be modified to have diminished nuclease activity e.g., nuclease inactivation of at least 70%, at least 80%, at least 90%, at least 95%, at least 97%, or 100% as compared with the wild type enzyme; or to put in another way, a Cas13 enzyme having advantageously about 0% of the nuclease activity of the non-mutated or wild type Cas13 enzyme or CRISPR-Cas protein, or no more than about 3% or about 5% or about 10% of the nuclease activity of the non-mutated or wild type Cas13 enzyme, e.g. of the non-mutated or wild type Francisella novicida U112 (FnCas13), Acidaminococcus sp. BV3L6 (AsCas13), Lachnospiraceae bacterium ND2006 (LbCas13) or Moraxella bovoculi 237 (MbCas13 Cas13 enzyme or CRISPR-Cas protein. This is possible by introducing mutations into the nuclease domains of the Cas13 and orthologs thereof.

[0747] In preferred embodiments of the present invention at least one Cas13 protein is used which is a Cas13 nickase. More particularly, a Cas13 nickase is used which does not cleave the target strand but is capable of cleaving only the strand which is complementary to the target strand, i.e. the non-target DNA strand also referred to herein as the strand which is not complementary to the guide sequence. More particularly the Cas13 nickase is a Cas13 protein which comprises a mutation in the arginine at position 1226A in the Nuc domain of Cas13 from Acidaminococcus sp., or a corresponding position in a Cas13 ortholog. In further particular embodiments, the enzyme comprises an arginine-to-alanine substitution or an R1226A mutation. It will be understood by the skilled person that where the enzyme is not AsCas13, a mutation may be made at a residue in a corresponding position. In particular embodiments, the Cas13 is FnCas13 and the mutation is at the arginine at position R1218. In particular embodiments, the Cas13 is LbCas13 and the mutation is at the arginine at position R1138. In particular embodiments, the Cas13 is MbCas13 and the mutation is at the arginine at position R1293.

[0748] In certain embodiments, use is made additionally or alternatively of a CRISPR-Cas protein which is is engineered and can comprise one or more mutations that reduce or eliminate a nuclease activity. The amino acid positions in the FnCas13p RuvC domain include but are not limited to D917A, E1006A, E1028A, D1227A, D1255A, N1257A, D917A, E1006A, E1028A, D1227A, D1255A and N1257A. Applicants have also identified a putative second nuclease domain which is most similar to PD-(D/E)XK nuclease superfamily and HincII endonuclease like. The point mutations to be generated in this putative nuclease domain to substantially reduce nuclease activity include but are not limited to N580A, N584A, T587A, W609A, D610A, K613A, E614A, D616A, K624A, D625A, K627A and Y629A. In a preferred embodiment, the mutation in the FnCas13p RuvC domain is D917A or E1006A, wherein the D917A or E1006A mutation completely inactivates the DNA cleavage activity of the FnCas13 effector protein. In another embodiment, the mutation in the FnCas13p RuvC domain is D1255A, wherein the mutated FnCas13 effector protein has significantly reduced nucleolytic activity.

[0749] More particularly, the inactivated Cas13 enzymes include enzymes mutated in amino acid positions As908, As993, As1263 of AsCas13 or corresponding positions in Cas13 orthologs. Additionally, the inactivated Cas13 enzymes include enzymes mutated in amino acid position Lb832, 925, 947 or 1180 of LbCas13 or corresponding positions in Cas13 orthologs. More particularly, the inactivated Cas13 enzymes include enzymes comprising one or more of mutations AsD908A, AsE993A, AsD1263A of AsCas13 or corresponding mutations in Cas13 orthologs. Additionally, the inactivated Cas13 enzymes include enzymes comprising one or more of mutations LbD832A, E925A, D947A or D1180A of LbCas13 or corresponding mutations in Cas13 orthologs.

[0750] Mutations can also be made at neighboring residues, e.g., at amino acids near those indicated above that participate in the nuclease activity. In some embodiments, only the RuvC domain is inactivated, and in other embodiments, another putative nuclease domain is inactivated, wherein the effector protein complex functions as a nickase and cleaves only one DNA strand. In a preferred embodiment, the other putative nuclease domain is a HincII-like endonuclease domain.

[0751] The inactivated Cas13 or Cas13 nickase may have associated (e.g., via fusion protein) one or more functional domains, including for example, an adenosine deaminase or catalytic domain thereof. In some cases it is advantageous that additionally at least one heterologous NLS is provided. In some instances, it is advantageous to position the NLS at the N terminus. In general, the positioning of the one or more functional domain on the inactivated Cas13 or Cas13 nickase is one which allows for correct spatial orientation for the functional domain to affect the target with the attributed functional effect. For example, when the functional domain is an adenosine deaminase catalytic domain thereof, the adenosine deaminase catalytic domain is placed in a spatial orientation which allows it to contact and deaminate a target adenine. This may include positions other than the N-/C-terminus of Cas13. In some embodiments, the adenosine deaminase protein or catalytic domain thereof is inserted into an internal loop of Cas13.

[0752] Determination of PAM

[0753] Determination of PAM can be ensured as follows. This experiment closely parallels similar work in E. coli for the heterologous expression of StCas9 (Sapranauskas, R. et al. Nucleic Acids Res 39, 9275-9282 (2011)). Applicants introduce a plasmid containing both a PAM and a resistance gene into the heterologous E. coli, and then plate on the corresponding antibiotic. If there is DNA cleavage of the plasmid, Applicants observe no viable colonies.

[0754] In further detail, the assay is as follows for a DNA target. Two E. coli strains are used in this assay. One carries a plasmid that encodes the endogenous effector protein locus from the bacterial strain. The other strain carries an empty plasmid (e.g. pACYC184, control strain). All possible 7 or 8 bp PAM sequences are presented on an antibiotic resistance plasmid (pUC19 with ampicillin resistance gene). The PAM is located next to the sequence of proto-spacer 1 (the DNA target to the first spacer in the endogenous effector protein locus). Two PAM libraries were cloned. One has a 8 random bp 5′ of the proto-spacer (e.g. total of 65536 different PAM sequences=complexity). The other library has 7 random bp 3′ of the proto-spacer (e.g. total complexity is 16384 different PAMs). Both libraries were cloned to have in average 500 plasmids per possible PAM. Test strain and control strain were transformed with 5′PAM and 3′PAM library in separate transformations and transformed cells were plated separately on ampicillin plates. Recognition and subsequent cutting/interference with the plasmid renders a cell vulnerable to ampicillin and prevents growth. Approximately 12h after transformation, all colonies formed by the test and control strains where harvested and plasmid DNA was isolated. Plasmid DNA was used as template for PCR amplification and subsequent deep sequencing. Representation of all PAMs in the untransfomed libraries showed the expected representation of PAMs in transformed cells. Representation of all PAMs found in control strains showed the actual representation. Representation of all PAMs in test strain showed which PAMs are not recognized by the enzyme and comparison to the control strain allows extracting the sequence of the depleted PAM.

[0755] The following PAMs have been identified for certain wild-type Cas13 orthologues: the Acidaminococcus sp. BV3L6 Cas13 (AsCas13), Lachnospiraceae bacterium ND2006 Cas13 (LbCas13) and Prevotella albensis (PaCas13) can cleave target sites preceded by a TTTV PAM, where V is A/C or G, FnCas13p, can cleave sites preceded by TTN, where N is A/C/G or T. The Moraxella bovoculi AAX08_00205, Moraxella bovoculi AAX11_00205, Butyrivibrio sp. NC3005, Thiomicrospira sp. XS5, or Lachnospiraceae bacterium MA2020 PAM is 5′ TTN, where N is A/C/G or T. The natural PAM sequence is TTTV or BTTV, wherein B is T/C or G and V is A/C or G and the effector protein is Moraxella lacunata Cas13.

[0756] Codon Optimized Nucleic Acid Sequences

[0757] Where the effector protein is to be administered as a nucleic acid, the application envisages the use of codon-optimized CRISPR-Cas type V protein, and more particularly Cas13-encoding nucleic acid sequences (and optionally protein sequences). An example of a codon optimized sequence, is in this instance a sequence optimized for expression in a eukaryote, e.g., humans (i.e. being optimized for expression in humans), or for another eukaryote, animal or mammal as herein discussed; see, e.g., SaCas9 human codon optimized sequence in WO 2014/093622 (PCT/US2013/074667) as an example of a codon optimized sequence (from knowledge in the art and this disclosure, codon optimizing coding nucleic acid molecule(s), especially as to effector protein (e.g., Cas13) is within the ambit of the skilled artisan). Whilst this is preferred, it will be appreciated that other examples are possible and codon optimization for a host species other than human, or for codon optimization for specific organs is known. In some embodiments, an enzyme coding sequence encoding a DNA/RNA-targeting Cas protein is codon optimized for expression in particular cells, such as eukaryotic cells. The eukaryotic cells may be those of or derived from a particular organism, such as a plant or a mammal, including but not limited to human, or non-human eukaryote or animal or mammal as herein discussed, e.g., mouse, rat, rabbit, dog, livestock, or non-human mammal or primate. In some embodiments, processes for modifying the germ line genetic identity of human beings and/or processes for modifying the genetic identity of animals which are likely to cause them suffering without any substantial medical benefit to man or animal, and also animals resulting from such processes, may be excluded. In general, codon optimization refers to a process of modifying a nucleic acid sequence for enhanced expression in the host cells of interest by replacing at least one codon (e.g., about or more than about 1, 2, 3, 4, 5, 10, 15, 20, 25, 50, or more codons) of the native sequence with codons that are more frequently or most frequently used in the genes of that host cell while maintaining the native amino acid sequence. Various species exhibit particular bias for certain codons of a particular amino acid. Codon bias (differences in codon usage between organisms) often correlates with the efficiency of translation of messenger RNA (mRNA), which is in turn believed to be dependent on, among other things, the properties of the codons being translated and the availability of particular transfer RNA (tRNA) molecules. The predominance of selected tRNAs in a cell is generally a reflection of the codons used most frequently in peptide synthesis. Accordingly, genes can be tailored for optimal gene expression in a given organism based on codon optimization. Codon usage tables are readily available, for example, at the “Codon Usage Database” available at www.kazusa.orjp/codon/ and these tables can be adapted in a number of ways. See Nakamura, Y., et al. “Codon usage tabulated from the international DNA sequence databases: status for the year 2000” Nucl. Acids Res. 28:292 (2000). Computer algorithms for codon optimizing a particular sequence for expression in a particular host cell are also available, such as Gene Forge (Aptagen; Jacobus, P A), are also available. In some embodiments, one or more codons (e.g., 1, 2, 3, 4, 5, 10, 15, 20, 25, 50, or more, or all codons) in a sequence encoding a DNA/RNA-targeting Cas protein corresponds to the most frequently used codon for a particular amino acid. As to codon usage in yeast, reference is made to the online Yeast Genome database available at http://www.yeastgenome.org/community/codon_usage.shtml, or Codon selection in yeast, Bennetzen and Hall, J Biol Chem. 1982 Mar. 25; 257(6):3026-31. As to codon usage in plants including algae, reference is made to Codon usage in higher plants, green algae, and cyanobacteria, Campbell and Gowri, Plant Physiol. 1990 January; 92(1): 1-11; as well as Codon usage in plant genes, Murray et al, Nucleic Acids Res. 1989 Jan. 25; 17(2):477-98; or Selection on the codon bias of chloroplast and cyanelle genes in different plant and algal lineages, Morton B R, J Mol Evol. 1998 April; 46(4):449-59.

[0758] In certain example embodiments, the CRISPR Cas protein is selected from Table 1.

TABLE 1

| C2c2 orthologue | Code | Multi Letter |
|---|---|---|
| Leptotrichia shahii | C2-2 | Lsh |
| L wadei F0279 (Lw2) | C2-3 | Lw2 |
| Listeria seeligeri | C2-4 | Lse |
| Lachnospiraceae bacterium MA2020 | C2-5 | LbM |
| Lachnospiraceae bacterium NK4A179 | C2-6 | LbNK179 |
| [Clostridium] aminophilum DSM 10710 | C2-7 | Ca |
| Carnobacterium gallinarum DSM 4847 | C2-8 | Cg |
| Carnobacterium gallinarum DSM 4847 | C2-9 | Cg2 |
| Paludibacter propionicigenes WB4 | C2-10 | Pp |
| Listeria weihenstephanensis FSL R9-0317 | C2-11 | Lwei |
| Listeriaceae bacterium FSL M6-0635 | C2-12 | LbFSL |
| Leptotrichia wadei F0279 | C2-13 | Lw |
| Rhodobacter capsulatus SB 1003 | C2-14 | Rc |
| Rhodobacter capsulatus R121 | C2-15 | Rc |
| Rhodobacter capsulatus DE442 | C2-16 | Rc |

[0759] In certain example embodiments, the CRISPR effector protein is a Cas13a protein selected from Table 2

TABLE 2

| | | | |
|---|---|---|---|
| c2c2-5 | 1 | Lachnospiraceae | mqiskvnhkhvavgqkdreritgfiyndpvgdeksledvvakrandtkvlfnvfnt |
| | | bacterium | kdlydsqesdksekdkeiiskgakfvaksfnsaitilkkqnkiystltsqqvikelkdk |
| | | MA2020 | fggariydddieealtetlkksfrkenvrnsikvlienaagirsslskdeeeliqeyfvk |
| | | (SEQ ID | qlveeytktklqknvyksiknqnmviqpdsdsqvlslsesrrekqssavssdtlvnc |
| | | No. 34) | kekdvlkafltdyavldedernsllwklrnlvnlyfygsesirdysytkeksvwkeh |
| | | | deqkanktlfideichitkigkngkeqkvldyeenrsrcrkqninyyrsalnyaknnt |
| | | | sgifenedsnhfwihlieneverlyngiengeefkfetgyisekvwkavinhlsikyi |
| | | | algkavynyamkelsspgdiepgkiddsyingitsfdyeiikaeeslqrdismnvvf |
| | | | atnylacatvdtdkdfllfskedirsctkkdgnlcknimqfwggystwknfceeylk |
| | | | ddkdalellyslksmlysmrnssfhfstenvdngswdteligklfeedcnraarieke |
| | | | kfynnnlhmfysssllekvlerlysshherasqvpsfnrvfvrknfpsslseqritpkft |
| | | | dskdeqiwqsavyylckeiyyndflqskeayklfregvknldkndinnqkaadsfk |
| | | | qavvyygkaignatlsqvcqaimteynrqnndglkkksayaekqnsnkykhyplf |
| | | | lkqvlqsafweyldenkeiygfisaqihksnveikaedfianyssqqykklvdkvk |
| | | | ktpelqkwytlgrlinprqanqflgsirnyvqfvkdiqrrakengnpirnyyevlesd |
| | | | siikilemctklngttsndihdyfrdedeyaeyisqfvnfgdvhsgaalnafcnsese |
| | | | gkkngiyydginpivnrnwvlcklygspdliskiisrvnenmihdfhkqedlireyq |
| | | | ikgicsnkkeqqdlrtfqvlknrvelrdiveyseiinelygqlikwcylrerdlmyfql |
| | | | gfhylclnnasskeadyikinvddrnisgailyqiaamyinglpvyykkddmyval |
| | | | ksgkkasdelnsneqtskkinyflkygnnilgdkkdqlylaglelfenvaeheniiifr |
| | | | neidhfhyfydrdrsmldlysevfdrfftydmklrknvvnmlynilldhnivssfvf |
| | | | etgekkvgrgdsevikpsakirlranngvssdvftykvgskdelkiatlpakneeflln |
| | | | varliyypdmeavsenmvregvvkveksndkkgkisrgsntrssnqskynnksk |
| | | | nrmnysmgsifekmdlkfd |
| c2c2-6 | 2 | Lachnospiraceae | mkiskvreenrgakltvnaktavvsenrsqegilyndpsrygksrkndedrdryies |
| | | bacterium | rlkssgklyrifnedknkretdelqwflseivkkinrrnglvlsdmlsvddrafekafe |
| | | NK4A179 | kyaelsytnrrnkvsgspafetcgvdaataerlkgiisetnfinriknnidnkvsediid |
| | | (SEQ ID | riiakylkkslcrervkrglkkllmnafdlpysdpdidvqrdfidyvledfyhvraks |
| | | No. 35) | qvsrsiknmnmpvqpegdgkfaitvskggtesgnkrsaekeafkkflsdyaslder |
| | | | vrddmlrrmrrlvvlyfygsddsklsdvnekfdvwedhaarrvdnrefiklplenkl |
| | | | angktdkdaerirkntykelyrnqnigcyrqavkaveednngryfddkmlnmffi |
| | | | hrieygvekiyanlkqvtefkartgylsekiwkdlinyisikyiamgkavynyamd |
| | | | elnasdkkeielgkiseeylsgissfdyelikaeemlqretavyvafaarhlssqtveld |
| | | | sensdflllkpkgtmdkndknklasnnilnflkdketlrdtilqyfgghslwtdfpfdk |
| | | | ylaggkddvdfltdlkdviysmrndsfhyatenhnngkwnkelisamfeheterm |
| | | | tvvmkdkfysnnlpmfyknddlkkllidlykdnverasqvpsfnkvfvrknfpalv |
| | | | rdkdnlgieldlkadadkgenelkfynalyymfkeiyynaflndknvrerfitkatkv |
| | | | adnydrnkernlkdriksagsdekkklreqlqnyiaendfgqriknivqvnpdytla |
| | | | qicqlimteynqqnngcmqkksaarkdinkdsyqhykmlllvnlrkaflefikeny |
| | | | afvlkpykhdlcdkadfvpdfakyvkpyaglisrvagsselqkwyivsrflspaqan |
| | | | hmlgflhsykqyvwdiyrrasetgteinhsiaedkiagvditdvdavidlsvklcgti |
| | | | sseisdyfkddevyaeyissyldfeydggnykdslnrfcnsdavndqkvalyydge |
| | | | hpklnrniilsklygerrflekitdrvsrsdiveyyklkketsqyqtkgifdsedeqkni |
| | | | kkfqemknivefrdlmdyseiadelqgqlinwiylrerdlmnfqlgyhyaclnnds |
| | | | nkqatyvtldyqgkknrkingailyqicamyinglplyyvdkdssewtvsdgkest |
| | | | gakigefyryaksfentsdcyasgleifenisehdnitelrnyiehfryyssfdrsflgiy |
| | | | sevfdrfftydlkyrknvptilynillqhfvnvrfefvsgkkmigidkkdrkiakekec |
| | | | aritirekngvyseqftyklkngtvyvdardkrylqsiirllfypekvnmdemievke |
| | | | kkkpsdnntgkgyskrdrqqdrkeydkykekkkkegnflsgmggninwdeina |
| | | | qlkn |
| c2c2-7 | 3 | [Clostridium] | mkfskvdhtrsavgiqkatdsvhgmlytdpkkqevndldkrfdqlnvkakrlynv |
| | | aminophilum | fnqskaeedddekrfgkvvkklnrelkdllfhrevsrynsignakynyygiksnpee |
| | | DSM | ivsnlgmveslkgerdpqkvisklllyylrkglkpgtdglrmileascglrklsgdeke |
| | | 10710 | lkvflqtldedfekktfkknlirsienqnmavqpsnegdpiigitqgrfnsqkneeks |
| | | SEQ ID | aiermmsmyadlnedhredvlrklrrinvlyfnvdtekteeptlpgevdtnpvfev |
| | | No. 36) | whdhekgkendrqfatfakiltedretrkkeklavkealndlksairdhnimayrcsi |
| | | | kvteqdkdglffedqrinrfwihhiesaverilasinpeklyklrigylgekvwkdlln |
| | | | ylsikyiavgkavfhfamedlgktgqdielgklsnsysggltsfdyeqiradetlqrql |
| | | | svevafaannlfravvgqtgkkieqskseeneedfllwkaekiaesikkegegntlks |
| | | | ilqffggasswdlnhfcaaygnessalgyetkfaddlrkaiyslrnetfhfttlnkgsfd |
| | | | wnakligdmfsheaatgiavertrfysnnlpmfyresdlkrimdhlyntyhprasqv |
| | | | psfnsvfvrknfrlflsntlntntsfdtevyqkwesgvyylfkeiyynsflpsgdahhlf |
| | | | feglrrirkeadnlpivgkeakkrnavqdfgrrcdelknlslsaicqmimteyneqnn |
| | | | gnrkykstredkrkpdifqhykmlllrtlqeafaiyirreefkfifdlpktlyvmkpve |
| | | | eflpnwksgmfdslvervkqspdlqrwyvlckflngrllnqlsgvirsyiqfagdiqr |
| | | | rakanhnrlymdntqrveyysnvlevvdfcikgtsrfsnvfsdyfrdedayadyldn |
| | | | ylqfkdekiaevssfaalktfcneeevkagiymdgenpvmqrnivmaklfgpdev |
| | | | lknvvpkvtreeieeyyqlekqiapyrqngyckseedqkkllrfqriknrvefqtitef |
| | | | seiinellgqliswsflrerdllyfqlgfhylclhndtekpaeykeisredgtvirnailhq |
| | | | vaamyvgglpvytladkklaafekgeadcklsiskdtagagkkikdffryskyvlik |
| | | | drmltdqnqkytiylaglelfentdehdnitdvrkyvdhfkyyatsdenamsildlys |
| | | | eihdrfftydmkyqknvanmlenillrhfvlirpefftgskkvgegkkitckaraqiei |
| | | | aengmrsedftyklsdgkknistcmiaardqkylntvarllyypheakksivdtrek |
| | | | knnkktnrgdgtfnkqkgtarkekdngprefndtgfsntpfagfdpfrns |
| c2c2-8 | 5 | Carnobacterium | mritkvkikldnklyqvtmqkeekygtlklneesrkstaeilrlkkasfnksfhsktin |
| | | gallinarum | sqkenknatikkngdyisqifeklvgvdtnknirkpkmsltdlkdlpkkdlalfikrk |
| | | DSM 4847 | fknddiveiknldlislfynalqkvpgehftdeswadfcqemmpyreyknkfierk |
| | | (SEQ ID | iillansieqnkgfsinpetfskrkrvlhqwaievqergdfsildeklsklaeiynfkk |
| | | No. 37) | mckrvqdelndleksmkkgknpekekeaykkqknfkiktiwkdypykthiglie |
| | | | kikeneelnqfnieigkyfehyfpikkerctedepyylnsetiattvnyqlknalisyl |
| | | | mqigkykqfglenqvldskklqeigiyegfqtkfmdacvfatsslkniiepmrsgdi |
| | | | lgkrefkeaiatssfvnyhhffpyfpfelkgmkdreselipfgeqteakqmqniwal |
| | | | rgsvqqirneifhsfdknqkfnlpqldksnfefdasenstgksqsyietdykflfeaek |
| | | | nqleqffierikssgaleyyplksleklfakkemkfslgsqvvafapsykklvkkghs |
| | | | yqtategtanylglsyynryelkeesfqaqyyllkliyqyvflpnfsqgnspafretvk |
| | | | ailrinkdearkkmkknkkflrkyafeqvremefketpdqymsylqsemreekvr |
| | | | kaekndkgfeknitmnfekllmqifvkgfdvflttfagkelllsseekviketeislsk |
| | | | kinerektlkasiqvehqlvatnsaisywlfcklldsrhlnelrnemikfkqsrikfnht |
| | | | qhaeliqnllpiveltilsndydekndsqnvdvsayfedkslyetapyvqtddrtrvsf |
| | | | rpilklekyhtkslieallkdnpqfrvaatdiqewmhkreeigelvekrknlhtewae |
| | | | gqqtlgaekreeyrdyckkidrfnwkankvtltylsqlhylitdllgrmvgfsalferd |
| | | | lvyfsrsfselggetyhisdyknlsgvlrinaevkpikiknikvidneenpykgnepe |
| | | | vkpfldrlhaylenvigikavhgkirnqtahlsvlqlelsmiesmnnlrdlmaydrkl |
| | | | knavtksmikildkhgmilklkidenhknfeieslipkeiihlkdkaiktnqvseeyc |
| | | | qlvlallttnpgnqln |
| c2c2-9 | 6 | Carnobacterium | mrmtkvkingspvsmnrsklnghlywngttntvniltkkeqsfaasflnktivkad |
| | | gallinarum | qvkgykvlaenifiifeqleksnsekpsvylnnirrlkeaglkrffkskyheeikytse |
| | | DSM 4847 | knqsvptklnliplffnavdriqedkfdeknwsyfckemspyldykksylnrkkeil |
| | | (SEQ ID | ansiqqnrgfsmptaeepnllskrkqlfqqwamkfqespliqqnnfaveqfnkefa |
| | | No. 38) | nkinelaavynvdelctaiteklmnfdkdksnktrnfeikklwkqhphnkdkalikl |
| | | | fnqegnealnqfnielgkyfehyfpktgkkesaesyylnpqtiiktvgyqlrnafvqy |
| | | | llqvgklhqynkgvldsqtlqeigmyegfqtkfmdacvfassslrniiqattnediltr |
| | | | ekfkkeleknvelkhdlffkteiveerdenpakkiamtpneldlwairgavqrvrnq |
| | | | ifhqqinkrhepnqlkvgsfengdlgnvsyqktiyqklfdaeikdieiyfaekikssg |
| | | | aleqysmkdleklfsnkeltlslggqvvafapsykklykqgyfyqnektieleqftdy |
| | | | dfsndvfkanyylikliyhyvflpqfsgannklfkdtvhyviqqnkelnttekdkkn |
| | | | nkkirkyafeqvklmknespekymqylqremqeertikeakktneekpnynfek |
| | | | lliqifikgfdtflrnfdlnlnpaeelvgtvkekaeglrkrkeriakilnvdeqiktgdeei |
| | | | afwifaklldarhlselrnemikfkqssvkkglikngdlieqmqpilelcilsndses |
| | | | mekesfdkievflekvelaknepymqedkltpvkfrfmkqlekyqtrnfienlvie |
| | | | npefkvsekivinwheekekiadlvdkrtklheewaskareieeynekikknkskk |
| | | | ldkpaefakfaeykiiceaienfnrldhkvrltylknlhylmidlmgrmvgfsvlfer |
| | | | dfvymgrsysalkkqsiylndydtfanirdwevnenkhlfgtsssdltfqetaefknl |
| | | | kkpmenqlkallgvtnhsfeirnniahlhvlrndgkgegvsllscmndlrklmsydr |
| | | | klknavtkaiikildkhgmilkltnndhtkpfeieslkpkkiihleksnhsfpmdqvs |
| | | | qeycdlvkkmlvftn |
| c2c2-10 | 7 | Paludibacter | mrvskykykdggkdkmvlvhrkttgaqlvysgqpvsnetsnilpekkrqsfdlstl |
| | | propionicigenes | nktiikfdtakkqklnvdqykivekifkypkqelpkqikaeeilpflnhkfqepvky |
| | | WB4 | wkngkeesfnitlliveavqaqdkrklqpyydwktwyiqtksdllkksiennridlte |
| | | (SEQ ID | nlskrkkallaweteftasgsidlthyhkvymtdvlckmlqdvkpltddkgkintna |
| | | No. 39) | yhrglkkalqnhqpaifgtrevpneanradnqlsiyhlevvkylehyfpiktskrrnt |
| | | | addiahylkaqtlkttiekqlvnairaniiqqgktnhhelkadttsndliriktneafvln |
| | | | ltgtcafaannirnmvdneqtndilgkgdfiksllkdntnsqlysfffgeglstnkaek |
| | | | etqlwgirgavqqirnnvnhykkdalktvfnisnfenptitdpkqqtnyadtiykarf |
| | | | inelekipeafaqqlktggaysyytienlksllttfqfslcrstipfapgfkkvfngginy |
| | | | qnakqdesfyelmleqylrkenfaeesynaryfmlkliynnlflpgfttdrkafadsv |
| | | | gfvqmqnkkqaekvnprkkeayafeavrpmtaadsiadymayvqselmqeqn |
| | | | kkeekvaeetrinfekfvlqvfikgfdsflrakefdfvqmpqpqltatasnqqkadkl |
| | | | nqleasitadckltpqyakaddathiafyvfcklldaahlsnlrnelikfresvnefkfh |
| | | | hlleiieicllsadvvptdyrdlysseadclarlrpfieqgaditnwsdlfvqsdkhspvi |
| | | | hanielsvkygttklleqiinkdtqfktteanftawntaqksieqlikqredhheqwvk |
| | | | aknaddkekqerkreksnfaqkfiekhgddyldicdyintynwldnkmhfvhlnr |
| | | | lhgltiellgrmagfvalfdrdfqffdeqqiadefklhgfvnlhsidkklnevptkkike |
| | | | iydirnkiiqingnkinesvranliqfisskrnyynnaflhvsndeikekqmydirnh |
| | | | iahfnyltkdaadfslidlinelrellhydrklknavskafidlfdkhgmilklklnadh |
| | | | klkveslepkkiyhlgssakdkpeyqyctnqvmmaycnmcrsllemkk |
| c2c2-11 | 9 | Listeria | mlallhqevpsqklhnlkslntesltklfkpkfqnmisyppskgaehvqfcltdiavp |
| | | weihenstephanensis | airdldeikpdwgiffeklkpytdwaesyihykqttiqksieqnkiqspdsprklvlq |
| | | FSL R9- | kyvtaflngeplgldlvakkykladlaesfkvvdlnedksanykikaclqqhqrnild |
| | | 0317 (SEQ | elkedpelnqygievkkyiqryfpikrapnrskharadflkkeliestveqqfknavy |
| | | ID No. 40) | hyvleqgkmeayeltdpktkdlqdirsgeafsfkfinacafasnnlkmilnpecekd |
| | | | ilgkgdfkknlpnsttqsdvvkkmipffsdeiqnvnfdeaiwairgsiqqirnevyh |
| | | | ckkhswksilkikgfefepnnmkytdsdmqklmdkdiakipdfieeklkssgiirf |
| | | | yshdklqsiwemkqgfsllttnapfvpsfkrvyakghdyqtsknryydlglttfdile |
| | | | ygeedfraryfltklvyyqqfmpwftadnnafrdaanfvlrinknrqqdakafinire |
| | | | veegemprdymgyvqgqiaihedstedtpnhfekfisqvfikgfdshmrsadlkfi |
| | | | knprnqgleqseieemsfdikvepsflknkddyiafwtfckmldarhlselrnemi |
| | | | kydghltgeqeiiglallgvdsrendwkqffssereyekimkgyvgeelyqrepyrq |
| | | | sdgktpilfrgveqarkygtetviqrlfdaspefkvskcnitewerqketieetierrkel |
| | | | hneweknpkkpqnnaffkeykeccdaidaynwhknkttivyvnelhhllieilgry |
| | | | vgyvaiadrdfqcmanqyfkhsgiterveywgdnrlksikkldtflkkeglfvsekn |
| | | | arnhiahlnylslksectllylserlreifkydrklknayskslidildrhgmsvvfanlk |
| | | | enkhrlvikslepkklrhlgekkidngyietnqvseeycgivkrllei |
| c2c2-12 | 10 | Listeriaceae | mkitkmrvdgrtivmertskegqlgyegidgnktteiifdkkkesfyksilnktvrkp |
| | | bacterium | dekeknrrkqainkainkeitelmlavlhqevpsqklhnlkslntesltklfkpkfqn |
| | | FSL M6-0635 = | misyppskgaehvqfcltdiavpairdldeikpdwgiffeklkpytdwaesyihyk |
| | | Listeria | qttiqksieqnkiqspdsprklvlqkyvtaflngeplgldlvakkykladlaesfklvdl |
| | | newyorkensis | nedksanykikaclqqhqrnildelkedpelnqygievkkyiqryfpikrapnrskh |
| | | FSL | aradflkkeliestveqqfknavyhyvleqgkmeayeltdpktkdlqdirsgeafsfk |
| | | M6-0635 | finacafasnnlkmilnpecekdilgkgnfkknlpnsttrsdvvkkmipffsdelqn |
| | | (SEQ ID | vnfdeaiwairgsiqqirnevyhckkhswksilkikgfefepnnmkyadsdmqkl |
| | | No. 41) | mdkdiakipefieeklkssgvvrfyrhdelqsiwemkqgfsllttnapfvpsfkrvy |
| | | | akghdyqtsknryynldlttfdileygeedfraryfltklvyyqqfmpwftadnnafr |
| | | | daanfvlrinknrqqdakafinireveegemprdymgyvqgqiaihedsiedtpnh |
| | | | fekfisqvfikgfdrhmrsanlkfiknprnqgleqseieemsfdikvepsflknkdd |
| | | | yiafwifckmldarhlselrnemikydghltgeqeiiglallgvdsrendwkqffsse |
| | | | reyekimkgyvveelyqrepyrqsdgktpilfrgvegarkygtetviqrlfdanpefk |
| | | | vskenlaewerqketieetikrrkelhnewaknpkkpqnnaffkeykeccdaiday |
| | | | nwhknkttlayvnelhhllieilgryvgyvaiadrdfqcmanqyflchsgiterveyw |
| | | | gdnrlksikkldtflkkeglfvseknarnhiahlnylslksectllylserlreifkydrkl |
| | | | knavskslidildrhgmsvvfanlkenkhrlvikslepkklrhlggkkidggyietnq |
| | | | vseeycgivkrllem |
| c2c2-13 | 12 | Leptotrichia | mkvtkvdgishkkyieegklykstseenrtserlsellsirldiyiknpdnaseeenrir |
| | | wadei | renlkkffsnkvlhlkdsvlylknrkeknavqdknyseediseydlknknsfsvlkk |
| | | F0279 | illnedvnseeleifrkdveaklnkinslkysfeenkanyqkinennvekvggkskr |
| | | (SEQ ID | niiydyyresakrndyinnvqeafdklykkedieklfflienskkhekykireyyhki |
| | | No. 42) | igrkndkenfakiiyeeiqnvnnikeliekipdmselkksqvfykyyldkeelndkn |
| | | | ikyafchfveiemsqllknyvykrlsnisndkikrifeyqnlkklienkllnkldtyvr |
| | | | ncgkynyylqvgeiatsdfiarnrqneaflrniigvssvayfslrniletenenditgrm |
| | | | rgktvknnkgeekyvsgevdkiynenkqnevkenlkmfysydfnmdnkneied |
| | | | ffanideaissirhgivhfnlelegkdifafkniapseiskkmfqneinekklklkifkq |
| | | | lnsanvfnyyekdviikylkntkfnfvnknipfvpsftklynkiedlrntlkffwsvp |
| | | | kdkeekdaqiyllkniyygeflnkfvknskyffkitnevikinkqrnqktghykyqk |
| | | | feniektvpveylaiiqsreminnqdkeekntyidfiqqiflkgfidylnknnlkyies |
| | | | nnnndnndifskikikkdnkekydkilknyekhnrnkeipheinefvreiklgkilk |
| | | | ytenlnmfylilkllnhkeltnlkgslekyqsankeetfsdelelinllnldnnrytedfe |
| | | | leaneigkfldfnenkikdrkelkkfdtnkiyfdgeniikhrafynikkygmlnlleki |
| | | | adkakykislkelkeysnkkneieknytmqqnlhrkyarpkkdekfndedykeye |
| | | | kaigniqkythlknkvefnelnllqglllkilhrlvgytsiwerdlrfrlkgefpenhyie |
| | | | eifnfdnsknvkyksgqivekyinfykelykdnvekrsiysdkkvkklkqekkdly |
| | | | irnyiahfnyiphaeisllevlenlrkllsydrklknaimksivdilkeygfvatfkiga |
| | | | dkkieiqtlesekivhlknlkkkklmtdrnseelcelvkvmfeykale |
| c2c2-14 | 15 | Rhodobacter | mqigkvqgrtisefgdpagglkrkistdgknrkelpahlssdpkaligqwisgidkiy |
| | | capsulatus | rkpdsrksdgkaihsptpskmqfdarddlgeafwklvseaglaqdsdydqfkrrlh |
| | | SB 1003 | pygdkfqpadsgaklkfeadppepqafhgrwygamskrgndakelaaalyehlh |
| | | (SEQ ID | vdekridgqpkrnpktdkfapglvvaralgiessylprgmarlarnwgeeeiqtyfv |
| | | No. 43) | vdvaasvkevakaavsaaqafdpprqvsgrslspkvgfalaehlervtgskrcsfdp |
| | | | aagpsvlalhdevkktykrlcargknaarafpadktellalmrhthenrvrnqmvr |
| | | | mgrvseyrgqqagdlaqshywtsagqteikeseifvrlwvgafalagrsmkawid |
| | | | pmgkivntekndrdltaavnirqvisnkemvaeamarrgiyfgetpeldrlgaegn |
| | | | egfvfallrylrgcrnqtfhlgaragflkeirkelektrwgkakeaehvvltdktvaair |
| | | | aiidndakalgarlladlsgafvahyaskehfstlyseivkavkdapevssglprlklll |
| | | | kradgvrgyvhglrdtrkhafatklppppaprelddpatkaryiallrlydgpfrayas |
| | | | gitgtalagpaarakeaatalaqsvnvtkaysdvmegrtsrlrppndgetlreylsaltg |
| | | | etatefrvqigyesdsenarkqaefienyrrdmlafmfedyirakgfdwilkiepgat |
| | | | amtrapvlpepidtrgqyehwqaalylvmhfvpasdvsnllhqlrkwealqgkyel |
| | | | vqdgdatdqadarrealdlykrfrdvlvlflktgearfegraapfdlkpfralfanpatf |
| | | | drlfmatpttarpaeddpegdgasepelrvartlrglrqiarynhmavlsdlfakhkvr |
| | | | deevarlaeiedetqeksqivaagelrtdlhdkvmkchpktispeerqsyaaaiktie |
| | | | ehrflvgrvylgdhlrlhrlmmdvigrlidyagayerdtgtflinaskqlgagadwav |
| | | | tiagaantdartqtrkdlahfnvldradgtpdltalvnraremmaydrkrknavprsil |
| | | | dmlarlgltlkwqmkdhllqdatitqaaikhldkvrltvggpaavtearfsqdylqm |
| | | | vaavfngsvqnpkprrrddgdawhkppkpataqsqpdqkppnkapsagsrlppp |
| | | | qvgevyegvvvkvidtgslgflavegvagniglhisrlrriredaiivgrryrfrveiyv |
| | | | ppksntsklnaadlvrid |
| c2c2-15 | 16 | Rhodobacter | mqigkvqgrtisefgdpagglkrkistdgknrkelpahlssdpkaligqwisgidkiy |
| | | capsulatus | rkpdsrksdgkaihsptpskmqfdarddlgeafwklvseaglaqdsdydqfkrrlh |
| | | R121 (SEQ ID | pygdkfqpadsgaklkfeadppepqafhgrwygamskrgndakelaaalyehlh |
| | | No. 44) | vdekridgqpkrnpktdkfapglvvaralgiessylprgmarlarnwgeeeiqtyfv |
| | | | vdvaasvkevakaavsaaqafdpprqvsgrslspkvgfalaehlervtgskrcsfdp |
| | | | aagpsvlalhdevkktykrlcargknaarafpadktellalmrhthenrvrnqmvr |
| | | | mgrvseyrgqqagdlaqshywtsagqteikeseifvrlwvgafalagrsmkawid |
| | | | pmgkivntekndrdltaavnirqvisnkemvaeamarrgiyfgetpeldrlgaegn |
| | | | egfvfallrylrgcrnqtfhlgaragflkeirkelektrwgkakeaehvvltdktvaair |
| | | | aiidndakalgarlladlsgafvahyaskehfstlyseivkavkdapevssglprlkill |
| | | | kradgvrgyvhglrdtrkhafatklppppaprelddpatkaryiallrlydgpfrayas |
| | | | gitgtalagpaarakeaatalaqsvnvtkaysdvmegrssrlrppndgetlreylsalt |
| | | | getatefrvqigyesdsenarkqaefienyrrdmlafmfedyirakgfdwilkiepga |
| | | | tamtrapvlpepidtrgqyehwqaalylvmhfvpasdvsnllhqlrkwealqgkye |
| | | | lvqdgdatdqadarrealdlykrfrdvlvlflktgearfegraapfdlkpfralfanpatf |
| | | | drlfmatpttarpaeddpegdgasepelrvartlrglrqiarynhmavlsdlfakhkvr |
| | | | deevarlaeiedetqeksqivaagelrtdlhdkvmkchpktispeerqsyaaaiktie |
| | | | ehrflvgrvylgdhlrlhrlmmdvigrlidyagayerdtgtflinaskqlgagadwav |
| | | | tiagaantdartqtrkdlahfnvldradgtpdltalvnraremmaydrkrknavprsil |
| | | | dmlarlgltlkwqmkdhllqdatitqaaikhldkvrltvggpaavtearfsqdylqm |
| | | | vaavfngsvqnpkprrrddgdawhkppkpataqsqpdqkppnkapsagsrlppp |
| | | | qvgevyegvvvkvidtgslgflavegvagniglhisrlrriredaiivgrryrfrveiyv |
| | | | ppksntsklnaadlvrid |
| c2c2-16 | 17 | Rhodobacter | mqigkvqgrtisefgdpagglkrkistdgknrkelpahlssdpkaligqwisgidkiy |
| | | capsulatus | rkpdsrksdgkaihsptpskmqfdarddlgeafwklvseaglaqdsdydqfkrrlh |
| | | DE442 | pygdkfqpadsgaklkfeadppepqafhgrwygamskrgndakelaaalyehlh |
| | | (SEQ ID | vdekridgqpkrnpktdkfapglvvaralgiessylprgmarlarnwgeeeiqtyfv |
| | | No. 45) | vdvaasvkevakaavsaaqafdpprqvsgrslspkvgfalaehlervtgskrcsfdp |
| | | | aagpsvlalhdevkktykrlcargknaarafpadktellalmrhthenrvrnqmvr |
| | | | mgrvseyrgqqagdlaqshywtsagqteikeseifvrlwvgafalagrsmkawid |
| | | | pmgkivntekndrdltaavnirqvisnkemvaeamarrgiyfgetpeldrlgaegn |
| | | | egfvfallrylrgcrnqtfhlgaragflkeirkelektrwgkakeaehvvltdktvaair |
| | | | aiidndakalgarlladlsgafvahyaskehfstlyseivkavkdapevssglprlklll |
| | | | kradgvrgyvhglrdtrkhafatklppppaprelddpatkaryiallrlydgpfrayas |
| | | | gitgtalagpaarakeaatalaqsvnvtkaysdvmegrssrlrppndgetlreylsalt |
| | | | getatefrvqigyesdsenarkqaefienyrrdmlafmfedyirakgfdwilkiepga |
| | | | tamtrapvlpepidtrgqyehwqaalylvmhfvpasdvsnllhqlrkwealqgkye |
| | | | lvqdgdatdqadarrealdlvkrfrdvlvlflktgearfegraapfdlkpfralfanpatf |
| | | | drlfmatpttarpaeddpegdgasepelrvartlrglrqiarynhmavlsdlfakhkvr |
| | | | deevarlaeiedetqeksqivaagelrtdlhdkvmkchpktispeerqsyaaaiktie |
| | | | ehrfivgrvylgdhlrlhrlmmdvigrlidyagayerdtgtflinaskqlgagadwav |
| | | | tiagaantdartqtrkdlahfnvldradgtpdltalvnraremmaydrkrknavprsil |
| | | | dmlarlgltlkwqmkdhllqdatitqaaikhldkvrltvggpaavtearfsqdylqm |
| | | | vaavfngsvqnpkprrrddgdawhkppkpataqsqpdqkppnkapsagsrlppp |
| | | | qvgevyegvvvkvidtgslgflavegvagniglhisrlrriredaiivgrryrfrveiyv |
| | | | ppksntsklnaadlvrid |
| c2c2-2 | | (SEQ ID | mgnlfghkrwyevrdkkdfkikrkvkvkrnydgnkyilninennnkekidnnkfi |
| | | No. 46) | rkyinykkndnilkeftrkfhagnilfklkgkegiiriennddfleteevvlyieaygks |
| | | | eklkalgitkkkiideairqgitkddkkieikrqeneeeieidirdeytnktlndcsiilri |
| | | | iendeletkksiyeifkninmslykiiekiienetekvfenryyeehlrekllkddkid |
| | | | viltnfmeirekiksnleilgfvkfylnvggdkkksknkkmlvekilninvdltvedi |
| | | | adfvikelefwnitkriekvkkvnneflekrrnrtyiksyvildkhekfkierenkkd |
| | | | kivkffveniknnsikekiekilaefkidelikklekelkkgncdteifgifkkhykvn |
| | | | fdskkfskksdeekelykiiyrylkgriekilvneqkvrlkkmekieiekilnesilse |
| | | | kilkrvkqytiehimylgklrhndidmttvntddfsrlhakeeldlelitffastnmeln |
| | | | kifsreninndenidffggdreknyvldkkilnskikiirdldfidnknnitnnfirkftk |
| | | | igtnernrilhaiskerdlqgtqddynkviniiqnlkisdeevskalnldvvfkdkknii |
| | | | tkindikiseennndikylpsfskvlpeilnlyrnnpknepfdtietekivlnaliyvnk |
| | | | elykklileddleeneskniflgelkktignideideniienyyknaqisaskgnnkai |
| | | | kkyqkkviecyigylrknyeelfdfsdfkmniqeikkqikdindnktyeritvktsd |
| | | | ktivinddfeyiisifallnsnavinkirnrffatsvwlntseyqniidildeimqlntlrn |
| | | | ecitenwnlnleefiqkmkeiekdfddfkiqtkkeifnnyyediknniltefkdding |
| | | | cdvlekklekivifddetkfeidkksnilqdeqrklsninkkdlkkkvdqyikdkdq |
| | | | eikskilcriifnsdflkkykkeidnliedmesenenkfqeiyypkerknelyiykkn |
| | | | lflnignpnfdkiyglisndikmadakflfnidgknirknkiseidailknlndklngy |
| | | | skeykekyikklkenddffakniqnknyksfekdynrvseykkirdlvefnylnki |
| | | | esylidinwklaiqmarferdmhyivnglrelgiiklsgyntgisraypkrngsdgfy |
| | | | tttayykffdeesykkfekicygfgidlsenseinkpenesirnyishfyivrnpfady |
| | | | siaeqidrvsnllsystrynnstyasvfevfkkdvnldydelkkkfklignndilerlm |
| | | | kpkkvsvlelesynsdyiknliielltkientndfl |
| c2c2-3 | | L wadei | mkvtkvdgishkkyieegklvkstseenrtserlsellsirldiyiknpdnaseeenrir |
| | | (Lw2) | renlkkffsnkvlhlkdsvlylknrkeknavqdknyseediseydlknknsfsvlkk |
| | | (SEQ ID | illnedvnseeleifrkdveaklnkinslkysfeenkanyqkinennvekvggkskr |
| | | No. 47) | niiydyyresakrndyinnvqeafdklykkedieklfflienskkhekykireyyhki |
| | | | igrkndkenfakiiyeeiqnvnnikeliekipdmselkksqvfykyyldkeelndkn |
| | | | ikyafchfveiemsqllknyvykrlsnisndkikrifeygnlkklienkllnkldtyvr |
| | | | ncgkynyylqvgeiatsdfiarnrqneaflrniigvssvayfslrniletenenditgrm |
| | | | rgktvknnkgeekyvsgevdkiynenkqnevkenlkmfysydfnmdnkneied |
| | | | ffanideaissirhgivhfnlelegkdifafkniapseiskkmfqneinekklklkifkq |
| | | | lnsanvfnyyekdviikylkntkfnfvnknipfvpsftklynkiedlrntlkffwsvp |
| | | | kdkeekdaqiyllkniyygeflnkfvknskyffkitnevikinkqrnqktghykyqk |
| | | | feniektvpveylaiiqsreminnqdkeekntyidfiqqiflkgfidylnknnlkyies |
| | | | nnnndnndifskikikkdnkekydkilknyekhnrnkeipheinefvreiklgkilk |
| | | | ytenlnmfylilkllnhkeltnlkgslekyqsankeetfsdelelinllnldnnrvtedfe |
| | | | leaneigkfldfnenkikdrkelkkfdtnkiyfdgeniikhrafynikkygmlnlleki |
| | | | adkakykislkelkeysnkkneieknytmqqnlhrkyarpkkdekfndedykeye |
| | | | kaigniqkythlknkvefnelnllqglllkilhrlvgytsiwerdlrfrlkgefpenhyie |
| | | | eifnfdnsknvkyksgqivekyinfykelykdnvekrsiysdkkvkklkqekkdly |
| | | | irnyiahfnyiphaeisllevlenlrkllsydrklknaimksivdilkeygfvatfkiga |
| | | | dkkieiqtlesekivhlknlkkkklmtdrnseelcelvkvmfeykalekrpaatkka |
| | | | gqakkkkgsypydvpdyaypydvpdyaypydvpdya* |
| c2c2-4 | | Listeria | mwisiktlihhlgvlffcdymynrrekkiievktmritkvevdrkkvlisrdknggkl |
| | | seeligeri | vyenemqdnteqimhhkkssfyksvvnkticrpeqkqmkklvhgllqensqeki |
| | | (SEQ ID | kvsdvtklnisnflnhrfkkslyyfpenspdkseeyrieinlsqlledslkkqqgtfic |
| | | No. 48) | wesfskdmelyinwaenyissktklikksirnnriqstesrsgqlmdrymkdilnkn |
| | | | kpfdiqsysekyqlekltsalkatfkeakkndkeinyklkstlqnherqiieelkense |
| | | | lnqfnieirkhletyfpikktnrkvgdirnleigeiqkivnhrlknkivqrilqegklasy |
| | | | eiestvnsnslqkikieeafalkfinaclfasnnlrnmyypvckkdilmigefknsfk |
| | | | eikhkkfirqwsqffsqeitvddielaswglrgaiapirneiihlkkhswkkffnnptf |
| | | | kvkkskiingktkdvtseflyketlfkdyfyseldsvpeliinkmesskildyyssdql |
| | | | nqvftipnfelslltsavpfapsfkrvylkgfdyqnqdeaqpdynlklniynekafns |
| | | | eafqaqyslfkmvyyqvflpqfttnndlfkssvdfiltlnkerkgyakafqdirkmn |
| | | | kdekpseymsyiqsqlmlyqkkqeekekinhfekfinqvfikgfnsfieknrltyic |
| | | | hptkntvpendnieipfhtdmddsniafwlmcklldakqlselrnemikfscslqst |
| | | | eeistftkareviglallngekgcndwkelfddkeawkknmslyvseellqslpytq |
| | | | edgqtpvinrsidlykkygtetileklfsssddykvsakdiaklheydvtekiaqqesl |
| | | | hkqwiekpglardsawtkkyqnvindisnyqwaktkveltqvrhlhqltidllsrla |
| | | | gymsiadrdfqfssnyilerenseyrvtswillsenknknkyndyelynlknasikv |
| | | | sskndpqlkvdlkqlrltleylelfdnrlkekrnnishfnylngqlgnsilelfddardvl |
| | | | sydrklknayskslkeilsshgmevtfkplyqtnhhlkidklqpkkihhlgekstvss |
| | | | nqvsneycqlvrtlltmk |
| C2-17 | | Leptotrichia | mkvtkvggishkkytsegrlykseseenrtderlsallnmrldmyiknpsstetken |
| | | buccalis | qkrigklkkffsnkmvylkdntlslkngkkenidreysetdilesdvrdkknfavlkk |
| | | C-1013-b | iylnenvnseelevfrndikkklnkinslkysfeknkanyqkinenniekvegkskr |
| | | (SEQ ID | niiydyyresakrdayvsnvkeafdklykeediaklvleienitklekykirefyheii |
| | | No. 49) | grkndkenfakiiyeeiqnvnnmkeliekvpdmselkksqvfykyyldkeelndk |
| | | | nikyafchfveiemsqllknyvykrlsnisndkikrifeyqnlkklienkllnkldtyv |
| | | | rncgkynyylqdgeiatsdfiarnrqneaflrniigvssvayfslrniletenenditgr |
| | | | mrgktvknnkgeekyvsgevdkiynenkknevkenlkmfysydfnmdnknei |
| | | | edffanideaissirhgivhfnlelegkdifafkniapseiskkmfqneinekklklkif |
| | | | rqlnsanvfrylekykilnylkrtrfefvnknipfvpsftklysriddlknslgiywktp |
| | | | ktnddnktkeiidaqiyllkniyygeflnyfmsnngnffeiskeiielnkndkrnlktg |
| | | | fyklqkfediqekipkeylaniqslyminagnqdeeekdtyidfiqkiflkgfmtyla |
| | | | nngrlsliyigsdeetntslaekkqefdkflkkyeqnnnikipyeineflreiklgnilk |
| | | | yterlnmfylilkllnhkeltnlkgslekyqsankeeafsdqlelinllnldnnrvtedfe |
| | | | leadeigkfldfngnkvkdnkelkkfdtnkiyfdgeniikhrafynikkygmlnlle |
| | | | kiadkagykisieelkkysnkkneieknhkmqenlhrkyarprkdekftdedyesy |
| | | | kqaienieeythlknkvefnelnllqglllrilhrlvgytsiwerdlrfrlkgefpenqyi |
| | | | eeifnfenkknvkykggqivekyikfykelhqndevkinkyssanikvlkqekkdl |
| | | | yirnyiahfnyiphaeisllevlenlrkllsydrklknavmksvvdilkeygfvatfki |
| | | | gadkkigiqtlesekivhlknlkkkklmtdrnseelcklvkimfeykmeekksen |
| C2-18 | | Herbinix | mkltrrrisgnsvdqkitaafyrdmsqgllyydsedndctdkviesmdferswrgril |
| | | hemicellulosilytica | kngeddknpfymfvkglvgsndkivcepidvdsdpdnldilinknitgfgrnlkap |
| | | (SEQ ID | dsndtlenlirkiqagipeeevlpelkkikemiqkdivnrkeqllksiknnripfslegs |
| | | No. 50) | klvpstkkmkwlfklidvpnktfnekmlekyweiydydklkanitnrldktdkkar |
| | | | sisravseelreyhknlrtnynrfvsgdrpaagldnggsakynpdkeefllflkeveq |
| | | | yfkkyfpvkskhsnkskdkslvdkyknycsykvvkkevnrsiinqlvagliqqgkl |
| | | | lyyfyyndtwqedflnsyglsyiqveeafkksvmtslswginrltsffiddsntvkfd |
| | | | dittkkakeaiesnyfnklrtcsrmqdhfkeklaffypvyvkdkkdrpdddienlivl |
| | | | vknaiesysylrnrtfhfkessllellkelddknsgqnkidysvaaefikrdienlydvf |
| | | | reqirslgiaeyykadmisdcflacglefalyspknslmpafknvykrganlnkayir |
| | | | dkgpketgdqgqnsykaleeyreltwyievknndqsynayknllqliyyhaflpev |
| | | | renealitdfinrtkewnrketeerintknnkkhknfdendditvntyryesipdyqg |
| | | | eslddylkvlqrkqmarakevnekeegnnnyiqfirdvvvwafgaylenklknyk |
| | | | nelqpplskeniglndtlkelfpeekvkspfnikcrfsistfidnkgkstdntsaeavkt |
| | | | dgkedekdkknikrkdllcfylflrlldeneicklqhqfikyrcslkerrfpgnrtklek |
| | | | etellaeleelmelvrftmpsipeisakaesgydtmikkyfkdfiekkvfknpktsnl |
| | | | yyhsdsktpvtrkymallmrsaplhlykdifkgyylitkkecleyiklsniikdyqns |
| | | | lnelheqleriklksekqngkdslyldkkdfykykeyvenleqvarykhlqhkinfe |
| | | | slyrifrihvdiaarmvgytqdwerdmhflfkalvyngvleerrfeaifnnnddnnd |
| | | | grivkkiqnnlnnknrelvsmlcwnkklnknefgaiiwkrnpiahlnhftqteqns |
| | | | kssleslinslrillaydrkrqnavtktindlllndyhirikwegrvdegqiyfnikeked |
| | | | ienepiihlkhlhkkdcyiyknsymfdkqkewicngikeevydksilkcignlfkf |
| | | | dyedknkssanpkht |
| C2-19 | | [Eubacterium] | mlrrdkevkklynvfnqiqvgtkpkkwnndeklspeenerraqqknikmknyk |
| | | rectale | wreacskyvessqriindvifysyrkaknklrymrknedilkkmqeaeklskfsgg |
| | | (SEQ ID | kledfvaytlrkslvvskydtqefdslaamvvflecigknnisdhereivckllelirkd |
| | | No. 51) | fskldpnvkgsqganivrsvrnqnmivqpqgdrflfpqvyakenetvtnknveke |
| | | | glnefllnyanlddekraeslrklrrildvyfsapnhyekdmditlsdniekekfnvw |
| | | | ekhecgkketglfvdipdvlmeaeaenikldavvekrerkvindrvrkqniicyryt |
| | | | ravvekynsneplffennainqywihhienaverilknckagklfklrkgylaekv |
| | | | wkdainlisikyialgkavynfalddiwkdkknkelgivderirngitsfdyemika |
| | | | henlqrelavdiafsvnnlaravcdmsnlgnkesdfllwkrndiadklknkddmas |
| | | | vsavlqffggksswdinifkdaykgkkkynyevrfiddlrkaiycarnenfhfktal |
| | | | vndekwntelfgkiferetefclnvekdrfysnnlymfyqvselrnmldhlysrsvsr |
| | | | aaqvpsynsvivrtafpeyitnvlgyqkpsydadtlgkwysacyyllkeiyynsflq |
| | | | sdralqlfeksvktlswddkkqqravdnfkdhfsdiksactslaqvcqiymteynqq |
| | | | nnqikkvrssndsifdqpvyqhykyllkkaianafadylknnkdlfgfigkpfkane |
| | | | ireidkeqflpdwtsrkyealcievsgsgelqkwyivgkflnarslnlmvgsmrsyi |
| | | | qyvtdikrraasignelhvsvhdvekvekwvqvievcsllasrtsnqfedyfndkdd |
| | | | yarylksyvdfsnvdmpseysalvdfsneeqsdlyvdpknpkvnrnivhsklfaa |
| | | | dhilrdivepvskdnieefysqkaeiayckikgkeitaeeqkavlkyqklknrvelrd |
| | | | iveygeiinellgqlinwsfmrerdllyfqlgfhydclrndskkpegyknikvdensi |
| | | | kdailyqiigmyvngvtvyapekdgdklkeqcvkggvgvkvsafhryskylglne |
| | | | ktlynagleifevvaehediinlrngidhfkyylgdyrsmlsiysevfdrfftydikyq |
| | | | knylnllqnillrhnvivepilesgfktigeqtkpgaklsirsiksdtfqykvkggtlitd |
| | | | akderyletirkilyyaeneednlkksvvvtnadkyeknkesddqnkqkekknkd |
| | | | nkgkkneetksdaeknnnerlsynpfanlnfklsn |
| C2-20 | | Eubacteriaceae | mkiskeshkrtavavmedrvggvvyvpggsgidlsnnlkkrsmdtkslynvfnqi |
| | | bacterium | qagtapseyewkdylseaenkkreaqkmiqkanyelrrecedyakkanlaysriif |
| | | CHKCI004 | skkpkkifsdddiishmkkqrlskfkgrmedfvlialrkslvvstynqevfdsrkaat |
| | | (SEQ ID | vflknigkknisadderqikqlmaliredydkwnpdkdssdkkessgtkvirsiehq |
| | | No. 52) | nmviqpeknklslskisnvgkktktkqkekagldaflkeyaqidensrmeylkklrr |
| | | | lldtyfaapssyikgaayslpeninfsselnvwerheaakkvninfveipesllnaeq |
| | | | nnnkinkveqehsleqlrtdirrrnitcyhfanalaaderyhtlffenmamnqfwihh |
| | | | menaverilkkcnvgtlfklrigylsekvwkdmlnllsikyialgkavyhfalddiw |
| | | | kadiwkdasdknsgkindltlkgissfdyemvkaqedlqremavgvafstnnlarv |
| | | | tckmddlsdaesdfllwnkeairrhvkytekgeilsailqffggrslwdeslfekaysd |
| | | | snyelkflddlkraiyaarnetfhfktaaidggswntrlfgslfekeaglclnveknkfy |
| | | | snnlvlfykqedlrvfldklygkecsraaqipsyntilprksfsdfmkqllglkepvyg |
| | | | saildqwysacyylfkevyynlflqdssakalfekavkalkgadkkqekavesfrkr |
| | | | yweisknaslaeicqsyiteynqqnnkerkvrsandgmfnepiyqhykmllkeal |
| | | | kmafasyikndkelkfvykpteklfevsqdnflpnwnsekyntlisevknspdlqk |
| | | | wyivgkfmnarmlnlllgsmrsylqyvsdiqkraaglgenqlhlsaenvgqvkkw |
| | | | iqvlevclllsvrisdkftdyfkdeeeyasylkeyvdfedsampsdysallafsnegki |
| | | | dlyvdasnpkvnrniiqaklyapdmvlkkvvkkisqdeckefnekkeqimqfkn |
| | | | kgdevsweeqqkileyqklknrvelrdlseygelinellgqlinwsylrerdllyfqlg |
| | | | fhysclmneskkpdayktirrgtvsienavlyqiiamyingfpvyapekgelkpqc |
| | | | ktgsagqkirafcqwasmvekkkyelynaglelfevykehdniidlrnkidhfkyy |
| | | | qgndsilalygeifdrfftydmkyrnnvinhlqnillrhnviikpiiskdkkevgrgk |
| | | | mkdraaflleevssdrftykykegerkidaknrlyletvrdilyfpnravndkgedvii |
| | | | cskkaqdlnekkadrdknhdkskdtnqkkegknqeeksenkepysdrmtwkpf |
| | | | agikle |
| C2-21 | | Blautia sp. | mkiskvdhvksgidqklssqrgmlykqpqkkyegkqleehvrnlsrkakalyqvf |
| | | Marseille- | pvsgnskmekelqiinsfiknillrldsgktseeivgyintysvasqisgdhiqelvdq |
| | | P2398 | hlkeslrkytcvgdkriyvpdiivallkskfnsetlqydnselkilidfiredylkekqik |
| | | (SEQ ID | qivhsiennstplriaeingqkrlipanvdnpkksyifeflkeyaqsdpkgqesllqh |
| | | No. 53) | mrylillylygpdkitddyceeieawnfgsivmdneqlfseeasmliqdriyvnqqi |
| | | | eegrqskdtakvkknkskyrmlgdkiehsinesvvkhyqeackaveekdipwik |
| | | | yisdhvmsvyssknrvdldklslpylakntwntwisfiamkyvdmgkgvyhfa |
| | | | msdvdkvgkqdnliigqidpkfsdgissfdyerikaeddlhrsmsgyiafavnnfar |
| | | | aicsdefrkknrkedvltvgldeiplydnvkrkllqyfggasnwddsiidiiddkdlv |
| | | | acikenlyvarnvnfhfagsekvqkkqddileeivrketrdigkhyrkvfysnnvav |
| | | | fycdediiklmnhlyqrekpyqaqipsynkvisktylpdlifmllkgknrtkisdpsi |
| | | | mnmfrgtfyfllkeiyyndflqasnlkemfceglknnvknkksekpyqnfmrrfe |
| | | | elenmgmdfgeicqqimtdyeqqnkqkkktatavmsekdkkirtldndtqkykh |
| | | | frtllyiglreafiiylkdeknkewyeflrepvkreqpeekefvnkwklnqysdcseli |
| | | | lkdslaaawyvvahfinqaqlnhligdiknyiqfisdidrrakstgnpvsesteiqier |
| | | | yrkilrvlefakffcgqitnyltdyyqdendfsthvghyvkfekknmepahalqafs |
| | | | nslyacgkekkkagfyydgmnpivnrnitlasmygnkkllenamnpvteqdirk |
| | | | yyslmaeldsvlkngavcksedeqknlrhfqnlknrielvdvltlselvndlvaqlig |
| | | | wvyirerdmmylqlglhyiklyftdsvaedsylrtldleegsiadgavlyqiaslysfn |
| | | | lpmyvkpnkssvyckkhvnsvatkfdifekeycngdetvienglrlfeninlhkdm |
| | | | vkfrdylahfkyfakldesilelyskaydfffsyniklkksysyvltnyllsyfinaklsf |
| | | | stykssgnktvqhrttkisvvaqtdyftyklrsivknkngvesienddrrcevvniaar |
| | | | dkefvdevcnvinynsdk |
| C2-22 | | Leptotrichia | mgnlfghkrwyevrdkkdfkikrkvkvkrnydgnkyilninennnkekidnnkfi |
| | | sp. oral | gefvnykknnnvlkefkrkfhagnilfklkgkeeiiriennddfleteevvlyievyg |
| | | taxon 879 | kseklkaleitkkkiideairqgitkddkkieikrqeneeeieidirdeytnktlndcsiil |
| | | str. F0557 | riiendeletkksiyeifkninmslykiiekiienetekvfenryyeehlrekllkdnki |
| | | (SEQ ID | dviltnfmeirekiksnleimgfvkfylnvsgdkkksenkkmfvekilntnvdltve |
| | | No. 54) | divdfivkelkfwnitkriekvkkfnneflenrrnrtyiksyvlldkhekfkierenkk |
| | | | dkivkffveniknnsikekiekilaefkinelikklekelkkgncdteifgifkkhykv |
| | | | nfdskkfsnksdeekelykiiyrylkgriekilvneqkvrlkkmekieiekilnesils |
| | | | ekilkrvkqytlehimylgklrhndivkmtvntddfsrlhakeeldlelitffastnme |
| | | | lnkifngkekvtdffgfnlngqkitlkekvpsfklnilkklnfinnennideklshfysf |
| | | | qkegyllrnkilhnsygniqetknlkgeyenveklikelkvsdeeiskslsldvifegk |
| | | | vdiinkinslkigeykdkkylpsfskivleitrkfreinkdklfdiesekiilnavkyvn |
| | | | kilyekitsneeneflktlpdklvkksnnkkenknllsieeyyknaqvssskgdkkai |
| | | | kkyqnkvtnayleylentfteiidfskfnlnydeiktkieerkdnkskiiidsistninit |
| | | | ndieyiisifallnsntyinkirnrffatsvwlekqngtkeydyeniisildevllinllre |
| | | | nnitdildlknaiidakivendetyiknyifesneeklkkrlfceelvdkedirkifede |
| | | | nfldksfikkneignfkinfgilsnlecnseveakkiigknskklesfiqniideyksni |
| | | | rtlfsseflekykeeidnlvedtesenknkfekiyypkehknelyiykknlflnignpn |
| | | | fdkiygliskdiknvdtkilfdddikknkiseidailknlndklngysndykakyvnk |
| | | | lkenddffakniqnenyssfgefekdynkvseykkirdlvefnylnkiesylidinw |
| | | | klaiqmarferdmhyivnglrelgiiklsgyntgisraypkrngsdgfytttayykffd |
| | | | eesykkfekicygfgidlsenseinkpenesirnyishfyivrnpfadysiaeqidrvs |
| | | | nllsystrynnstyasvfevfkkdvnldydelkkkfrlignndilerlmkpkkvsvlel |
| | | | esynsdyiknliielltkientndtl |
| C2-23 | | Lachnospiraceae | mkiskvdhtrmavakgnqhrrdeisgilykdptktgsidfderfkklncsakilyhv |
| | | bacterium | fngiaegsnkyknivdkvnnnldrvlftgksydrksiididtvlrnvekinafdriste |
| | | NK4A144 | ereqiiddlleiqlrkglrkgkaglrevlligagvivrtdkkqeiadfleildedfnktnq |
| | | (SEQ ID | akniklsienqglvvspvsrgeerifdvsgaqkgksskkaqekealsaflldyadldk |
| | | No. 55) | nvrfeylrkirrlinlyfyvknddvmslteipaevnlekdfdiwrdheqrkeengdfv |
| | | | gcpdilladrdvkksnskqvkiaerqlresireknikryrfsiktiekddgtyffankqi |
| | | | svfwihrienaverilgsindkklyrlrlgylgekvwkdilnflsikyiavgkavfnfa |
| | | | mddlqekdrdiepgkisenavngltsfdyeqikademlqrevavnvafaannlarv |
| | | | tvdipqngekedillwnksdikkykknskkgilksilqffggastwnmkmfeiayh |
| | | | dqpgdyeenylydiiqiiyslrnksfhfktydhgdknwnreligkmiehdaervisv |
| | | | erekfhsnnlpmfykdadlkkildllysdyagrasqvpafntvlvrknfpeflrkdm |
| | | | gykvhfnnpevenqwhsavyylykeiyynlflrdkevknlfytslknirsevsdkk |
| | | | qklasddfasrceeiedrslpeicqiimteynaqnfgnrkyksqrvieknkdifrhyk |
| | | | mlliktlagafslylkqerfafigkatpipyettdvknflpewksgmyasfveeiknnl |
| | | | dlqewyivgrflngrmlnqlagslrsyiqyaedierraaenrnklfskpdekieackk |
| | | | avrvldlcikistrisaeftdyfdseddyadylekylkyqddaikelsgssyaaldhfc |
| | | | nkddlkfdiyvnagqkpilqrnivmaklfgpdnilsevmekvtesaireyydylkk |
| | | | vsgyrvrgkcstekeqedllkfqrlknavefrdvteyaevinellgqliswsylrerdll |
| | | | yfqlgfhymclknksfkpaeyvdirrnngtiihnailyqivsmyingldfyscdkeg |
| | | | ktlkpietgkgvgskigqfikysqylyndpsykleiynaglevfenidehdnitdlrk |
| | | | yvdhfkyyaygnkmslldlyseffdrfftydmkyqknvvnvlenillrhfvifypkf |
| | | | gsgkkdvgirdckkeraqieiseqsltsedfmfklddkageeakkfparderylqtia |
| | | | kllyypneiedmnrfmkkgetinkkvqfnrkkkitrkqknnssnevlsstmgylfk |
| | | | nikl |
| C2-24 | | Chloroflexus | mtdqvrreevaageladtplaaaqtpaadaavaatpapaeavaptpeqavdqpattg |
| | | aggregans | eseapvttaqaaaheaepaeatgasftpvseqqpqkprrlkdlqpgmelegkvtsial |
| | | (SEQ ID | ygifvdvgvgrdglvhsemsdrridtpselvqigdtvkvwyksvdldarrisltml |
| | | No. 56) | npsrgekprrsrqsqpaqpqprrqevdreklaslkvgeivegvitgfapfgafadigv |
| | | | gkdglihiselsegrvekpedavkvgeryqfkvleidgegtrislslrraqrtqrmqql |
| | | | epgqiiegtvsgiatfgafvdigvgrdglvhisalaphrvakvedvvkvgdkvkvk |
| | | | vlgvdpqskrisltmrleeeqpattagdeaaepaeevtptrrgnlerfaaaaqtarerse |
| | | | rgersergerrerrerrpaqsspdtyivgedddesfegnatiedlltkfggsssrrdrdrr |
| | | | rrheddddeemerpsnrrqreairrtlqqigyde |
| C2-25 | | Demequina | mdltwhallilfivallagfldtlagggglltvpallltgipplqalgtnklqssfgtgmat |
| | | aurantiaca | yqvirkkrvhwrdvrwpmvwaflgsaagavavqfidtdalliiipvvlalvaayflf |
| | | (SEQ ID | vpkshlpppeprmsdpayeativpiigaydgafgpgtgslyalsgvalraktivqsta |
| | | No. 57) | iaktlnfatnfaallvfafaghmlwtvgavmiagqligayagshmlfrvnplvlrvli |
| | | | vvmslgmlirvlld |
| C2-26 | | Thalassospira | mriikpygrshvegvatqeprrklrinsspdisrdipgfaqshdaliiaqwisaidkiat |
| | | sp. | kpkpdkkptqaqinlrttlgdaawqhvmaenllpaatdpaireklhliwqskiapw |
| | | TSL5-1 | gtarpqaekdgkptpkggwyerfcgvlspeaitqnvarqiakdiydhlhvaakrkg |
| | | (SEQ ID | repakqgessnkpgkfkpdrkrglieeraesiaknalrpgshapcpwgpddqatye |
| | | No. 58) | qagdvagqiyaaardcleekkrrsgnrntssvqylprdlaakilyaqygrvfgpdtti |
| | | | kaaldeqpslfalhkaikdcyhrlindarkrdilrilprnmaalfrlvraqydnrdinali |
| | | | rlgkvihyhaseqgksehhgirdywpsqqdiqnsrfwgsdgqadikrheafsriwr |
| | | | hiialasrtlhdwadphsqkfsgenddilllakdaieddvfkaghyerkcdvlfgaqa |
| | | | slfcgaedfekailkqaitgtgnlrnatfhfkgkvrfekelqeltkdvpvevqsaiaal |
| | | | wqkdaegrtrqiaetlqavlaghflteeqnrhifaaltaamaqpgdvplprlrrvlarh |
| | | | dsicqrgrilplspcpdrakleespaltcqytvlkmlydgpfrawlaqqnstilnhyid |
| | | | stiartdkaardmngrklaqaekdlitsraadlprlsvdekmgdflarltaatatemrv |
| | | | qrgyqsdgenaqkqaafigqfecdvigrafadflnqsgfdfvlklkadtpqpdaaqc |
| | | | dvtaliapddisvsppqawqqvlyfilhlvpvddashllhqirkwqvlegkekpaqi |
| | | | ahdvqsvlmlyldmhdakftggaalhgiekfaeffahaadfravfppqslqdqdrsi |
| | | | prrglreivrfghlpllqhmsgtvqithdnvvawqaartagatgmspiarrqkqreel |
| | | | halavertarfrnadlqnymhalvdvikhrqlsaqvtlsdqvrlhrlmmgvlgrlvd |
| | | | yaglwerdlyfvvlallyhhgatpddvfkgqgkknladgqvvaalkpknrkaaap |
| | | | vgvfddldhygiyqddrqsirnglshfnmlrggkapdlshwvnqtrslvandrklk |
| | | | navaksviemlaregfdldwgiqtdrgqhilshgkirtrqaqhfqksrlhivkksakp |
| | | | dkndtvkirenlhgdamvervvqlfaaqvqkryditvekrldhlflkpqdqkgkng |
| | | | ihthngwsktekkrrpsrenrkgnhen |
| C2-27 | | SAMN044 | mkfskeshrktavgvtesngiigllykdpinekekiedvvnqranstkrlfnlfgteat |
| | | 87830_13920 | skdisraskdlakvvnkaignlkgnkkfnkkeqitkglntkiiveelknvlkdekkli |
| | | [Pseudobutyrivibrio | vnkdiideacsrllktsfrtaktkqavkmiltavlientnlskedeafvheyfvkklvne |
| | | sp. OR37] | ynktsvkkqipvalsnqnmviqpnsvngtleisetkksketkttekdafraflrdyatl |
| | | (SEQ ID | denrrhkmrlclrnlvnlyfygetsvskddfdewrdhedkkqndelfvkkivsiktd |
| | | No. 59) | rkgnvkevldvdatidairtnniacyrralayanenpdvffsdtmlnkfwihhvene |
| | | | veriyghinnntgdykyqlgylsekvwkgiinylsikyiaegkavynyamnalak |
| | | | dnnsnafgkldekfvngitsfeyerikaeetlqrecavniafaanhlanatvdlnekds |
| | | | diflllkhednkdtlgavarpnilrnilqffggksrwndfdfsgideiqllddlrkmiysl |
| | | | rnssfhfktenidndswntkligdmfaydfnmagnvqkdkmysnnvpmfysts |
| | | | diekmldrlyaevherasqvpsfnsvfvrknfpdylkndlkitsafgvddalkwqsa |
| | | | vyyvckeiyyndflqnpetftmlkdyvqclpididksmdqklksernahknfkeaf |
| | | | atyckecdslsaicqmimteynnqnkgnrkvisartkdgdkliykhykmilfealk |
| | | | nvftiyleknintygflkkpklinnvpaieeflpnyngrqyetivnfiteetelqkwyi |
| | | | vgrllnpkqvnqlignfrsyvqyvndvarrakqtgnnlsndniawdvkniiqifdvc |
| | | | tklngvtsniledyfddgddyarylknfvdytnknndhsatllgdfcakeidgikigi |
| | | | yhdgtnpivnrniiqcklygatgiisdltkdgsilsvdyeiikkymqmqkeikvyqq |
| | | | kgicktkeeqqnlkkyqelknivelrniidyseildelqgqlinwgylrerdlmyfql |
| | | | gfhylclhneskkpvgynnagdisgavlyqivamytnglslidangkskknakasa |
| | | | gakvgsfcsyskeirgvdkdtkedddpiylagvelfeninehqqcinlrnyiehfhy |
| | | | yakhdrsmldlysevfdrfftydmkytknvpnmmynillqhlvvpafefgssekrl |
| | | | ddndeqtkpramftlreknglsseqftyrlgdgnstvklsargddylravasllyypdr |
| | | | apeglirdaeaedkfakinhsnpksdnrnnrgnfknpkvqwynnktkrk |
| C2-28 | | SAMN029 | mkiskvdhrktavkitdnkgaegfiyqdptrdsstmeqiisnrarsskvlfnifgdtk |
| | | 10398_00008 | kskdlnkytesliiyvnkaikslkgdkrnnkyeeiteslktervlnaliqagneftcsen |
| | | [Butyrivibrio | niedalnkylkksfrvgntksalkkllmaaycgyklsieekeeignyfvdklvkeyn |
| | | sp. YAB3001] | kdtvlkytakslkhqnmvvqpdtdnhvflpsriagatqnkmsekealteflkayavl |
| | | (SEQ ID | deekrhnlriilrklvnlyfyespdfiypennewkehddrknktetfvspvkvneek |
| | | No. 60) | ngktfvkidvpatkdlirlkniecyrrsvaetagnpityftdhniskfwihhienevek |
| | | | ifallksnwkdyqfsvgyisekvwkeiinylsikyiaigkavynyaledikkndgtl |
| | | | nfgvidpsfydginsfeyekikaeetfqrevavyvsfavnhlssatvklseaqsdmlv |
| | | | lnkndiekiaygntkrnilqffggqskwkefdfdryinpvnytdidflfdikkmvysl |
| | | | rnesfhftttdtesdwnknlisamfeyecrristvqknkffsnnlplfygenslervlhk |
| | | | lyddyvdrmsqvpsfgnvfvrkkfpdymkeigikhnlssednlklqgalyflykei |
| | | | yynafissekamkifvdlvnkldtnarddkgritheamahknfkdaishymthdcs |
| | | | ladicqkimteynqqntghrkkqttysseknpeifrhykmilfmllqkamteyisse |
| | | | eifdfimkpnspktdikeeeflpqykscaydnlikliadnvelqkwyitarllsprev |
| | | | nqligsfrsykqfvsdierraketnnslsksgmtvdvenitkvldlctklngrfsneltd |
| | | | yfdskddyavyvskfldfgfkidekfpaallgefcnkeengkkigiyhngtepilns |
| | | | niiksklygitdvvsravkpvseklireylqqevkikpylengvcknkeeqaalrky |
| | | | gelknriefrdiveyseiinelmgqlinfsylrerdlmyfqlgfhylclnnygakpegy |
| | | | ysivndkrtikgailyqivamytyglpiyhyvdgtisdrrknkktvldtlnssetvgak |
| | | | ikyfiyysdelfndslilynaglelfeninehenivnlrkyidhfkyyvsqdrslldiys |
| | | | evfdryftydrkykknymnlfsnimlkhfiitdfefstgektigekntakkecakvri |
| | | | krgglssdkftykfkdakpielsakntefldgvarilyypenvvltdlvrnsevedekr |
| | | | iekydrnhnssptrkdktykqdvkknynkktskafdsskldtksvgnnlsdnpvlk |
| | | | qflseskkkr |
| C2-29 | | Blautia sp. | mkiskvdhvksgidqklssqrgmlykqpqkkyegkqleehvrnlsrkakalyqvf |
| | | Marseille- | pvsgnskmekelqiinsfiknillrldsgktseeivgyintysvasqisgdhiqelvdq |
| | | P2398 | hlkeslrkytcvgdkriyvpdiivallkskfnsetlqydnselkilidfiredylkekqik |
| | | (SEQ ID | qivhsiennstplriaeingqkrlipanvdnpkksyifeflkeyaqsdpkgqesllqh |
| | | No. 61) | mrylillylygpdkitddyceeieawnfgsivmdneqlfseeasmliqdriyvnqqi |
| | | | eegrqskdtakvkknkskyrmlgdkiehsinesvvkhyqeackaveekdipwik |
| | | | yisdhvmsvyssknrvdldklslpylakntwntwisfiamkyvdmgkgvyhfa |
| | | | msdvdkvgkqdnliigqidpkfsdgissfdyerikaeddlhrsmsgyiafavnnfar |
| | | | aicsdefrkknrkedvltvgldeiplydnvkrkllqyfggasnwddsiidiiddkdlv |
| | | | acikenlyvarnvnfhfagsekvqkkqddileeivrketrdigkhyrkvfysnnvav |
| | | | fycdediiklmnhlyqrekpyqaqipsynkvisktylpdlifmllkgknrtkisdpsi |
| | | | mnmfrgtfyfllkeiyyndflqasnlkemfceglknnvknkksekpyqnfmrrfe |
| | | | elenmgmdfgeicqqimtdyeqqnkqkkktatavmsekdkkirtldndtqkykh |
| | | | frtllyiglreafiiylkdeknkewyeflrepvkreqpeekefvnkwklnqysdcseli |
| | | | lkdslaaawyvvahfinqaqlnhligdiknyiqfisdidrrakstgnpvsesteiqier |
| | | | yrkilrvlefakffcgqitnvltdyyqdendfsthvghyvkfekknmepahalqafs |
| | | | nslyacgkekkkagfyydgmnpivnrnitlasmygnkkllenamnpvteqdirk |
| | | | yyslmaeldsvlkngavcksedeqknlrhfqnlknrielvdvltlselvndlvaqlig |
| | | | wvyirerdmmylqlglhyiklyftdsvaedsylrtldleegsiadgavlyqiaslysfn |
| | | | lpmyvkpnkssvyckkhvnsvatkfdifekeycngdetvienglrlfeninlhkdm |
| | | | vkfrdylahfkyfakldesilelyskaydfffsyniklkksysyvltnyllsyfinaklsf |
| | | | stykssgnktvqhrttkisvvaqtdyftyklrsivknkngvesienddrrcevvniaar |
| | | | dkefvdevcnvinynsdk |
| C2-30 | | Leptotrichia | mkitkidgishkkyikegklvkstseenktderlselltirldtyiknpdnaseeenrirr |
| | | sp. | enlkeffsnkvlylkdgilylkdrreknqlqnknyseediseydlknknnflvlkkill |
| | | Marseille- | nedinseeleifrndfekkldkinslkysleenkanyqkinennikkvegkskrnify |
| | | P3007 | nyykdsakrndyinniqeafdklykkedienlfflienskkhekykirecyhkiigrk |
| | | (SEQ ID | ndkenfatiiyeeiqnvnnmkeliekvpnvselkksqvfykyylnkeklndeniky |
| | | No. 62) | vfchfveiemskllknyvykkpsnisndkvkrifeyqslkklienkllnkldtyvrnc |
| | | | gkysfylqdgeiatsdfivgnrqneaflrniigvsstayfslrniletenenditgrmrg |
| | | | ktvknnkgeekyisgeidklydnnkqnevkknlkmfysydfnmnskkeiedffs |
| | | | nideaissirhgivhfnlelegkdiftfknivpsqiskkmfhdeinekklklkifkqlns |
| | | | anvfrylekykilnylnrtrfefvnknipfvpsftklysriddlknslgiywktpktndd |
| | | | nktkeitdaqiyllkniyygeflnyfmsnngnffeitkeiielnkndkrnlktgfyklq |
| | | | kfenlqektpkeylaniqslyminagnqdeeekdtyidfiqkiflkgfmtylanngrl |
| | | | sliyigsdeetntslaekkqefdkflkkyeqnnnieipyeinefvreiklgkilkyterl |
| | | | nmfylilkllnhkeltnlkgslekyqsankeeafsdqlelinllnldnnrvtedfelead |
| | | | eigkfldfngnkvkdnkelkkfdtnkiyfdgeniikhrafynikkygmlnllekisd |
| | | | eakykisieelknyskkkneieenhttgenlhrkyarprkdekftdedykkyekair |
| | | | niqqythlknkvefnelnllqslllrilhrlvgytsiwerdlrfrlkgefpenqyieeifnf |
| | | | dnsknvkykngqivekyinfykelykddtekisiysdkkvkelkkekkdlyirnyi |
| | | | ahfnyipnaeisllemlenlrkllsydrklknaimksivdilkeygfvvtfkiekdkki |
| | | | rieslkseevvhlkklklkdndkkkepiktyrnskelcklvkvmfeykmkekksen |
| C2-31 | | Bacteroides | mritkvkvkessdqkdkmvlihrkvgegtlvldenladltapiidkykdksfelsllk |
| | | ihuae | qtivsekemnipkcdkctakerclsckgrekrlkevrgaiektigaviagrdiiprlnif |
| | | (SEQ ID | nedeicwlikpklrneftfkdvnkqvvklnlpkvlveyskkndptlflayqqwiaay |
| | | No. 63) | lknkkghikksilnnrvvidysdesklskrkqalelwgeeyetnqrialesyhtsyni |
| | | | gelvtllpnpeeyvsdkgeirpafhyklknvlqmhqstvfgtneilcinpifnenrani |
| | | | qlsaynlevvkyfehyfpikkkkknlslnqaiyylkvetlkerlslqlenalrmnllqk |
| | | | gkikkhefdkntcsntlsqikrdeffvinlvemcafaannirnivdkeqvneilskkd |
| | | | lcnslskntidkelctkfygadfsqipvaiwamrgsvqqirneivhykaeaidkifal |
| | | | ktfeyddmekdysdtpfkqylelsiekidsffieqlssndvinyyctedvnkllnkck |
| | | | lslrrtsipfapgfktiyelgchlqdssntyrighylmliggrvanstvtkaskaypayrf |
| | | | mlkliynhlflnkfldnhnkrffmkavafvlkdnrenarnkfqyafkeirmmnnde |
| | | | siasymsyihslsvqeqekkgdkndkvryntekfiekvfvkgfddflswlgvefils |
| | | | pnqeerdktvtreeyenlmikdrvehsinsnqeshiafftfcklldanhlsdlrnewik |
| | | | frssgdkegfsynfaidiielclltvdrveqrrdgykeqtelkeylsffikgnesentvw |
| | | | kgfyfqqdnytpvlyspielirkygtlellkliivdedkitqgefeewqtlkkvvedkv |
| | | | trrnelhqewedmknkssfsqekcsiyqklcrdidrynwldnklhlvhlrklhnlvi |
| | | | qilsrmarfialwdrdfvlldasranddykllsffnfrdfinakktktddellaefgskie |
| | | | kknapfikaedvplmvecieakrsfyqkvffrnnlqvladrnfiahynyisktakcsl |
| | | | femiiklrtlmyydrklrnavvksianvfdqngmvlqlslddshelkvdkviskriv |
| | | | hlknnnimtdqvpeeyykicrrllemkk |
| C2-32 | | SAMN052 | mefrdsifksllqkeiekaplcfaeklisggvfsyypserlkefvgnhpfslfrktmpf |
| | | 16357_1045 | spgfkrvmksggnyqnanrdgrfydldigvylpkdgfgdeewnaryflmkliyn |
| | | [Porphyromonadaceae | qlflpyfadaenhlfrecvdfvkrvnrdyncknnnseeqafidirsmredesiadyla |
| | | bacterium | fiqsniiieenkkketnkegqinfnkfllqvfvkgfdsflkdrtelnflqlpelqgdgtrg |
| | | KH3CP3RA] | ddlesldklgavvavdlkldatgidadlnenisfytfcklldsnhlsrlrneiikyqsans |
| | | (SEQ ID | dfshnedfdydriisiielcmlsadhvstndnesifpnndkdfsgirpylstdakvetf |
| | | No. 64) | edlyvhsdaktpitnatmvlnwkygtdklferlmisdqdflvtekdyfvwkelkkd |
| | | | ieekiklreelhslwvntpkgkkgakkkngrettgefseenkkeylevcreidryvnl |
| | | | dnklhfvhlkrmhslliellgrfvgftylferdyqyyhleirsrrnkdagvvdkleynk |
| | | | ikdqnkydkddffactflyekankvrnfiahfnyltmwnspqeeehnsnlsgakns |
| | | | sgrqnlkcsltelinelrevmsydrklknavtkavidlfdkhgmvikfrivnnnnnd |
| | | | nknkhhlelddivpkkimhlrgiklkrqdgkpipiqtdsvdplycrmwkklldlkp |
| | | | tpf |
| C2-33 | | Listeria | mhdawaenpkkpqsdaflkeykacceaidtynwhknkativyvnelhhllidilg |
| | | riparia | rlvgyvaiadrdfqcmanqylkssghtervdswintirknrpdyiekldifmnkagl |
| | | (SEQ ID | fvsekngrnyiahlnylspkhkysllylfeklremlkydrklknavtkslidlldkhg |
| | | No. 65) | mcvvfanlknnkhrlviaslkpkkietfkwkkik |
| C2-34 | | Insolitispirillum | mriirpygsstvaspspqdaqpirslqrqngtfdvaefsrrhpelvlaqwvamldkii |
| | | peregrinum | rkpapgknstalprptaeqrrlrqqvgaalwaemqrhtpvppelkavwdskvhpy |
| | | (SEQ ID | skdnapataktpshrgrwydrfgdpetsaatvaegvrrhlldsaqpfranggqpkgk |
| | | No. 66) | gviehraltiqngtllhhhqsekagplpedwstyradelvstigkdarwikvaaslyq |
| | | | hygrifgpttpiseaqtrpefvlhtavkayyrrlfkerklpaerlerllprtgealrhavtv |
| | | | qhgnrsladavrigkilhygwlqngepdpwpddaalyssrywgsdgqtdikhsea |
| | | | vsrvwrraltaaqrtltswlypagtdagdilligqkpdsidrnrlpllygdstrhwtrsp |
| | | | gdvwflkqtlenlrnssfhfktlsaftshldgtcesepaeqqaaqalwqddrqqdhq |
| | | | qvflslraldattylptgplhrivnavqstdatlplprfrrvvtraantrlkgfpvepvnrrt |
| | | | meddpllrcrygvlkllyergfrawletrpsiascldqslkrstkaaqtingknspqgv |
| | | | eilsratkllqaegggghgihdlfdrlyaataremrvqvgyhhdaeaarqqaefiedl |
| | | | kcevvarafcaylktlgiqgdtfrrqpeplptwpdlpdlpsstigtaqaalysvlhlmp |
| | | | vedvgsllhqlrrwlvalqarggedgtaitatipllelylnrhdakfsgggagtglrwd |
| | | | dwqvffdcqatfdryfppgpaldshrlplrglrevlrfgryndlaaligqdkitaaevd |
| | | | rwhtaeqtiaaqqqrrealheqlsrkkgtdaevdeyralvtaiadhrhltahvtlsnvv |
| | | | rlhrlmttvlgrlydygglwerditfvtlyeahrlgglrnllsesrynkfldgqtpaalsk |
| | | | knnaeengmiskylgdkarrqirndfahfnmlqqgkktinitdeinnarklmahdr |
| | | | klknaitrsvttllqqdgldivwtmdashrltdakidsrnaihlhkthnranireplhgk |
| | | | sycrwvaalfgatstpsatkksdkir |

[0760] In certain example embodiments, the CRISPR effector protein is aCas13b protein selected from Table 3.

TABLE 3

| | | |
|---|---|---|
| Bergeyella | 1 | menktslgnniyynpfkpqdksyfagyfnaamentdsvfrelgkrlkgkeytsenf |
| zoohelcum | | fdaifkenislveyeryvkllsdyfpmarlldkkevpikerkenfkknfkgiikavrd |
| (SEQ ID No. 67) | | lrnfythkehgeveitdeifgvldemlkstvltvkkkkvktdktkeilkksiekqldil |
| | | cqkkleylrdtarkieekrrnqrergekelvapfkysdkrddliaaiyndafdvyidk |
| | | kkdslkesskakyntksdpqqeegdlkipiskngvvfllslfltkqeihafkskiagfk |
| | | atvideatvseatvshgknsicfmatheifshlaykklkrkvrtaeinygeaenaeqls |
| | | vyaketlmmqmldelskvpdvvygnisedvqktfiedwneylkenngdvgtme |
| | | eeqvihpvirkryedkfnyfairfldefaqfptlrfqvhlgnylhdsrpkenlisdrrik |
| | | ekitvfgrlselehkkalfikntetnedrehyweifpnpnydfpkenisvndkdfpia |
| | | gsildrekqpvagkigikvkllnqqyvsevdkavkahqlkqrkaskpsiqniieeiv |
| | | pinesnpkeaivfggqptaylsmndihsilyeffdkwekkkeklekkgekelrkei |
| | | gkelekkivgkiqaqiqqiidkdtnakilkpyqdgnstaidkeklikdlkqeqnilqk |
| | | lkdeqtvrekeyndfiayqdknreinkvrdrnhkqylkdnlkrkypeaparkevly |
| | | yrekgkvavwlandikrfmptdfknewkgeqhsllqkslayyeqckeelknllpe |
| | | kvfqhlpfklggyfqqkylyqfytcyldkrleyisglvqqaenfksenkvfkkvene |
| | | cfkflkkqnythkeldarvqsilgypiflergfmdekptiikgktfkgnealfadwfr |
| | | yykeyqnfqtfydtenyplvelekkqadrkrktkiyqqkkndvifilmakhifksvf |
| | | kqdsidqfsledlyqsreerlgnqerarqtgerntnyiwnktvdlklcdgkitvenvkl |
| | | knvgdfikyeydqrvqaflkyeeniewqaflikeskeeenypyvvereieqyekvr |
| | | reellkevhlieeyilekvkdkeilkkgdnqnfkyyilngllkqlknedvesykvfnl |
| | | ntepedvninqlkqeatdleqkafvltyirnkfahnqlpkkefwdycqekygkiek |
| | | ektyaeyfaevfkkekealik |
| Prevotella | 2 | meddkkttdsiryelkdkhfwaaflnlarhnvyitvnhinkileegeinrdgyettlk |
| intermedia | | ntwneikdinkkdrlskliikhfpfleaatyrinptdttkqkeekqaeaqsleslrksff |
| (SEQ ID No. 68) | | vfiyklrdlrnhyshykhskslerpkfeegllekmynifnasirlykedyqynkdin |
| | | pdedfichldrteeefnyyftkdnegnitesgliffvslflekkdaiwmqqklrgfkdn |
| | | renkkkmtnevfcrsrmllpklrlqstqtqdwilldmlnelircpkslyerlreedrek |
| | | frvpieiadedydaeqepfkntlvrhqdrfpyfalryfdyneiftnlrfqidlgtyhfsi |
| | | ykkqigdykeshhlthklygferiqeftkqnrpdewrkfvktfnsfetskepyipett |
| | | phyhlenqkigirfrndndkiwpslktnseknekskykldksfqaeaflsvhellpm |
| | | mfyylllktentdndneietkkkenkndkqekhkieeiienkiteiyalydtfangei |
| | | ksideleeyckgkdieighlpkqmiailkdehkvmateaerkqeemlvdvqksle |
| | | sldnqineeienverknsslksgkiaswlvndmmrfqpvqkdnegkplnnskans |
| | | teyqllqrtlaffgseherlapyfkqtkliessnphpflkdtewekcnnilsfyrsylea |
| | | kknfleslkpedweknqyflklkepktkpktivqgwkngfnlprgiftepirkwfm |
| | | khrenitvaelkrvglvakviplffseeykdsvqpfynyhfnvgninkpdeknflnc |
| | | eerrellrkkkdefkkmtdkekeenpsylefkswnkferelrlyrnqdivtwilcme |
| | | lfnkkkikelnvekiylknintnttkkeknteekngeeknikeknnilnrimpmrlpi |
| | | kvygrenfsknkkkkirrntfftvyieekgtkllkqgnfkalerdrrlgglfsfvktpsk |
| | | aesksntisklrveyelgeyqkarieiikdmlalektlidkynsldtdnfnkmltdwle |
| | | lkgepdkasfqndvdlliavrnafshnqypmrnriafaninpfslssantseekglgi |
| | | anqlkdkthktiekiieiekpietke |
| Prevotella | 3 | mqkqdklfvdrkknaifafpkyitimenkekpepiyyeltdkhfwaafinlarhnv |
| buccae | | yttinhinrrleiaelkddgymmgikgswneqakkldkkvrlrdlimkhfpfleaaa |
| (SEQ ID No. 69) | | yemtnskspnnkeqrekeqsealslnnlknvlfifleklqvlrnyyshykyseespk |
| | | pifetsllknmykvfdanvrlvkrdymhhenidmqrdfthlnrkkqvgrtkniids |
| | | pnfhyhfadkegnmtiagllffvslfldkkdaiwmqkklkgfkdgrnlreqmtnev |
| | | fcrsrislpklklenvqtkdwmqldmlnelvrcpkslyerlrekdresfkvpfdifsd |
| | | dynaeeepfkntivrhqdrfpyfvlryfdlneifeqlrfqidlgtyhfsiynkrigdede |
| | | vrhlthhlygfariqdfapqnqpeewrklykdldhfetsqepyisktaphyhleneki |
| | | gikfcsahnnlfpslqtdktcngrskfnlgtqftaeaflsvhellpmmfyyllltkdysr |
| | | kesadkvegiirkeisniyaiydafanneinsiadltrrlqntnilqghlpkqmisilkg |
| | | rqkdmgkeaerkigemiddtqrrldlickqtnqkifigkrnagliksgkiadwlvnd |
| | | mmrfqpvqkdqnnipinnskansteyrmlqralalfgsenfrlkayfnqmnlvgn |
| | | dnphpflaetqwehqtnilsfyrnylearkkylkglkpqnwkqyqhflilkvqktnr |
| | | ntlvtgwknsfnlprgiftqpirewfekhnnskriydqilsfdrvgfvakaiplyfaee |
| | | ykdnvqpfydypfnignrlkpkkrqfldkkervelwqknkelfknypsekkktdl |
| | | ayldflswkkferelrliknqdivtwlmfkelfnmatveglkigeihlrdidtntanee |
| | | snnilnrimpmklpvktyetdnkgnilkerplatfyieetetkvlkqgnfkalvkdrrl |
| | | nglfsfaettdlnleehpiskisvdlelikyqttrisifemtlglekklidkystlptdsfrn |
| | | mlerwlqckanrpelknyvnsliavrnafshnqypmydatlfaevkkftlfpsvdtk |
| | | kielniapqlleivgkaikeieksenkn |
| Porphyromonas | 4 | mntvpasenkgqsrtveddpqyfglylnlarenlieveshvrikfgkkklneeslkq |
| gingivalis | | sllcdhllsvdrwtkvyghsrrylpflhyfdpdsqiekdhdsktgvdpdsaqrlirely |
| (SEQ ID No. 70) | | slldflrndfshnrldgttfehlevspdissfitgtyslacgraqsrfavffkpddfvlakn |
| | | rkeqlisvadgkecltvsgfafficlfldreqasgmlsrirgfkrtdenwaravhetfcd |
| | | lcirhphdrlessntkeallldmlnelnrcprilydmlpeeeraqflpaldensmnnls |
| | | ensldeesrllwdgssdwaealtkrirhqdrfpylmlrfieemdllkgirfrvdlgeiel |
| | | dsyskkvgrngeydrtitdhalafgklsdfqneeevsrmisgeasypvrfslfaprya |
| | | iydnkigychtsdpvypksktgekralsnpqsmgfisvhdlrklllmellcegsfsr |
| | | mqsdflrkanrildetaegklqfsalfpemrhrfippqnpkskdrrekaettlekykq |
| | | eikgrkdklnsqllsafdmdqrqlpsrlldewmnirpashsvklrtyvkqlnedcrlr |
| | | lrkfrkdgdgkaraiplvgematflsqdivrmiiseetkklitsayynemqrslaqya |
| | | geenrrqfraivaelrlldpssghpflsatmetahrytegfykcylekkrewlakifyr |
| | | peqdentkrrisvffvpdgearkllpllirrrmkeqndlqdwirnkqahpidlpshlf |
| | | dskvmellkykdgkkkwneafkdwwstkypdgmqpfyglrrelnihgksysyi |
| | | psdgkkfadcythlmektvrdkkrelrtagkpvppdlaadikrsfhravnerefmlr |
| | | lvqeddrlmlmainkmmtdreedilpglknidsildeenqfslavhakvlekegeg |
| | | gdnslslvpatieikskrkdwskyiryrydrrvpglmshfpehkatldevktllgeyd |
| | | rcrikifdwafalegaimsdrdlkpylhesssregksgehstivkmlvekkgcltpde |
| | | sqylilirnkaahnqfpcaaempliyrdvsakvgsiegssakdlpegsslvdslwkk |
| | | yemiirkilpildpenrffgkllnnmsqpindl |
| Bacteroides | 5 | mesiknsqkstgktlqkdppyfglylnmallnyrkvenhirkwlgdvallpeksgf |
| pyogenes | | hsllttdnlssakwtrfyyksrkflpflemfdsdkksyenrretaecldtidrqkissllk |
| (SEQ ID No. 71) | | evygklqdirnafshyhiddqsvkhtaliissemhrfienaysfalqktrarftgvfvet |
| | | dflqaeekgdnkkffaiggnegiklkdnalifliclfldreeafkflsratgfkstkekgf |
| | | lavretfcalccrqpherllsvnpreallmdmlnelnrcpdilfemldekdqksflpll |
| | | geeeqahilenslndelceaiddpfemiaslskrvryknrfpylmlryieeknllpfir |
| | | fridlgclelasypkkmgeennyersvtdhamafgrltdfhnedavlqqitkgitdev |
| | | rfslyapryaiynnkigfvrtsgsdkisfptlkkkggeghcvaytlqntksfgfisiydl |
| | | rkilllsfldkdkaknivsglleqcekhwkdlsenlfdairtelqkefpvplirytlprsk |
| | | ggklvsskladkqekyeseferrkeklteilsekdfdlsqiprrmidewlnvlptsrek |
| | | klkgyvetlkldcrerlrvfekrekgehplpprigematdlakdiirmvidqgvkqri |
| | | tsayyseiqrclaqyagddnrrhldsiirelrlkdtknghpflgkvlrpglghteklyqr |
| | | yfeekkewleatfypaaspkrvprfvnpptgkqkelpliirnlmkerpewrdwkqr |
| | | knshpidlpsqlfeneicrllkdkigkepsgklkwnemfklywdkefpngmqrfy |
| | | rckrrvevfdkvveyeyseeggnykkyyealidevvrqkissskeksklqvedltls |
| | | vrrvfkrainekeyqlrllceddrllfmavrdlydwkeaqldldkidnmlgepvsvs |
| | | qviqleggqpdavikaecklkdvsklmrycydgrvkglmpyfanheatqeqvem |
| | | elrhyedhrrrvfnwvfaleksvlkneklrrfyeesqggcehrrcidalrkaslvseee |
| | | yeflvhirnksahnqfpdleigklppnvtsgfceciwskykaiicriipfidperrffgk |
| | | lleqk |
| Alistipes | 6 | msneigafrehqfayapgnekqeeatfatyfnlalsnvegmmfgevesnpdkiek |
| sp. ZOR0009 | | sldtlppailrqiasfiwlskedhpdkaysteevkvivtdlvrrlcfyrnyfshcfyldtq |
| (SEQ ID No. 72) | | yfysdelvdttaigeklpynfhhfitnrlfryslpeitlfrwnegerkyeilrdgliffcclf |
| | | lkrgqaerflnelrffkrtdeegrikrtiftkyctreshkhigieeqdflifqdiigdlnrvp |
| | | kvcdgvvdlskeneryiknretsnesdenkaryrllirekdkfpyylmryivdfgvl |
| | | pcitfkqndystkegrgqfhyqdaavaqeercynfvvrngnvyysympqaqnvv |
| | | riselqgtisveelrnmvyasingkdvnksveqylyhlhllyekiltisgqtikegrvd |
| | | vedyrplldklllrpasngeelrrelrkllpkrvcdllsnrfdcsegvsavekrlkaillrh |
| | | eqlllsqnpalhidkiksvidylylffsddekfrqqptekahrglkdeefqmyhylvg |
| | | dydshplalwkeleasgrlkpemrkltsatslhglymlclkgtvewcrkqlmsigk |
| | | gtakveaiadrvglklydklkeytpeqlerevklvvmhgyaaaatpkpkaqaaips |
| | | kltelrfysflgkremsfaafirqdkkaqklwlrnfytveniktlqkrqaaadaackkl |
| | | ynlvgevervhtndkvlvlvaqryrerllnvgskcavtldnperqqkladvyevqna |
| | | wlsirfddldftlthvnlsnlrkaynliprkhilafkeyldnrvkqklceecrnvrrkedl |
| | | ctccsprysnitswlkenhsessiereaatmmlldverkllsfllderrkaiieygkfip |
| | | fsalvkecrladaglcgirndvlhdnvisyadaigklsayfpkeaseaveyirrtkevr |
| | | eqrreelmanssq |
| Prevotella | 7a | mskeckkqrqekkrrlqkanfsisltgkhvfgayfnmartnfvktinyilpiagvrg |
| sp. MA2016 | | nysenqinkmlhalfliqagrneeltteqkqwekklrlnpeqqtkfqkllflchfpvlg |
| (SEQ ID No. 73) | | pmmadvadhkaylnkkkstvqtedetfamlkgvsladcldiiclmadtltecrnfy |
| | | thkdpynkpsqladqylhqemiakkldkvvvasrrilkdreglsvnevefltgidhl |
| | | hqevlkdefgnakvkdgkvmktfveyddfyfkisgkrlvngytvttkddkpvnvn |
| | | tmlpalsdfgllyfcvlflskpyaklfidevrlfeyspfddkenmimsemlsiyrirtp |
| | | rlhkidshdskatlamdifgelrrcpmelynlldknagqpffhdevkhpnshtpdvs |
| | | krlryddrfptlalryidetelfkrirfqlqlgsfrykfydkencidgrvrvrriqkeingy |
| | | grmqevadkrmdkwgdliqkreersvkleheelyinldqfledtadstpyvtdrrp |
| | | aynihanriglywedsqnpkqykvfdengmyipelvvtedkkapikmpaprcal |
| | | svydlpamlfyeylreqqdnefpsaeqviieyeddyrkffkavaegklkpfkrpkef |
| | | rdflkkeypklrmadipkklqlflcshglcynnkpetvyerldrltlqhleerelhiqnr |
| | | lehyqkdrdmignkdnqygkksfsdvrhgalarylaqsmmewqptklkdkekg |
| | | hdkltglnynvltaylatyghpqvpeegftprtleqvlinahliggsnphpfinkvlal |
| | | gnrnieelylhyleeelkhirsriqslssnpsdkalsalpfihhdrmryhertseemm |
| | | alaaryttiqlpdglftpyileilqkhytensdlqnalsqdvpvklnptcnaaylitlfyq |
| | | tvlkdnaqpfylsdktytrnkdgekaesfsfkrayelfsvlnnnkkdtfpfemiplflt |
| | | sdeiqerlsaklldgdgnpvpevgekgkpatdsqgntiwkrriysevddyaekltdr |
| | | dmkisfkgeweklprwkqdkiikrrdetrrqmrdellqrmpryirdikdnertlrry |
| | | ktqdmvlfllaekmftniiseqssefnwkqmrlskvcneaflrqtltfrvpvtvgetti |
| | | yvegenmslknygefyrfltddrlmsllnnivetlkpnengdlvirhtdlmselaay |
| | | dqyrstifmliqsienliitnnavlddpdadgfwvredlpkrnnfasllelinqlnnvel |
| | | tdderkllvairnafshnsynidfslikdvkhlpevakgilqhlqsmlgveitk |
| Prevotella | 7b | mskeckkqrqekkrrlqkanfsisltgkhvfgayfnmartnfvktinyilpiagvrg |
| sp. MA2016 | | nysenqinkmlhalfliqagrneeltteqkqwekklrlnpeqqtkfqkllflchfpvlg |
| (SEQ ID No. 74) | | pmmadvadhkaylnkkkstvqtedetfamlkgvsladcldiiclmadtltecrnfy |
| | | thkdpynkpsqladqylhqemiakkldkvvvasrrilkdreglsvnevefltgidhl |
| | | hqevlkdefgnakvkdgkvmktfveyddfyfkisgkrlvngytvttkddkpvnvn |
| | | tmlpalsdfgllyfcvlflskpyaklfidevrlfeyspfddkenmimsemlsiyrirtp |
| | | rlhkidshdskatlamdifgelrrcpmelynlldknagqpffhdevkhpnshtpdvs |
| | | krlryddrfptlalryidetelfkrirfqlqlgsfrykfydkencidgrvrvrriqkeingy |
| | | grmqevadkrmdkwgdliqkreersvkleheelyinldqfledtadstpyvtdrrp |
| | | aynihanriglywedsqnpkqykvfdengmyipelvvtedkkapikmpaprcal |
| | | svydlpamlfyeylreqqdnefpsaeqviieyeddyrkffkavaegklkpfkrpkef |
| | | rdflkkeypklrmadipkklqlflcshglcynnkpetvyerldrltlqhleerelhiqnr |
| | | lehyqkdrdmignkdnqygkksfsdvrhgalarylaqsmmewqptklkdkekg |
| | | hdkltglnynvltaylatyghpqvpeegftprtleqvlinahliggsnphpfinkvlal |
| | | gnrnieelylhyleeelkhirsriqslssnpsdkalsalpfihhdrmryhertseemm |
| | | alaaryttiqlpdglftpyileilqkhytensdlqnalsqdvpvklnptcnaaylitlfyq |
| | | tvlkdnaqpfylsdktytrnkdgekaesfsfkrayelfsvlnnnkkdtfpfemiplflt |
| | | sdeiqerlsaklldgdgnpvpevgekgkpatdsqgntiwkrriysevddyaekltdr |
| | | dmkisfkgeweklprwkqdkiikrrdetrrqmrdellqrmpryirdikdnertlrry |
| | | ktqdmvlfllaekmftniiseqssefnwkqmrlskvcneaflrqtltfrvpvtvgetti |
| | | yvegenmslknygefyrfltddrlmsllnnivetlkpnengdlvirhtdlmselaay |
| | | dqyrstifmliqsienliitnnavlddpdadgfwvredlpkrnnfasllelinqlnnvel |
| | | tdderkllvairnafshnsynidfslikdvkhlpevakgilqhlqsmlgveitk |
| Riemerella | 8 | mekpllpnvytlkhkffwgaflniarhnafitichineqlglktpsnddkivdvvcet |
| anatipestifer | | wnnilnndhdllkksqltelilkhfpfltamcyhppkkegkkkghqkeqqkekese |
| (SEQ ID No. 75) | | aqsqaealnpskliealeilvnqlhslrnyyshykhkkpdaekdifkhlykafdaslr |
| | | mvkedykahftvnltrdfahlnrkgknkqdnpdfnryrfekdgfftesgllfftnlfld |
| | | krdaywmlkkvsgfkashkgrekmttevfcrsrillpklrlesrydhnqmlldmls |
| | | elsrcpkllyeklseenkkhfqveadgfldeieeeqnpfkdtlirhqdrfpyfalryldl |
| | | nesfksirfqvdlgtyhyciydkkigdeqekrhltrtllsfgrlqdfteinrpqewkalt |
| | | kdldyketsnqpfiskttphyhitdnkigfrlgtskelypsleikdganriakypynsg |
| | | fvahafisvhellplmfyqhltgksedllketvrhiqriykdfeeerintiedlekanqg |
| | | rlplgafpkqmlgllqnkqpdlsekakikiekliaetkllshrintklksspklgkrrek |
| | | liktgvladwlvkdfmrfqpvaydaqnqpiksskanstefwfirralalyggeknrl |
| | | egyfkqtnligntnphpflnkfnwkacrnlvdfyqqylegrekfleaiknqpwepy |
| | | qyclllkipkenrknlvkgweqggislprglfteairetlsedlmlskpirkeikkhgr |
| | | vgfisraitlyfkekyqdkhqsfynlsykleakapllkreehyeywqqnkpqsptes |
| | | qrlelhtsdrwkdyllykrwqhlekklrlyrnqdvmlwlmtleltknhfkelnlnyh |
| | | qlklenlavnvqeadaklnpinqtlpmvlpvkvypatafgevqyhktpirtvyiree |
| | | htkalkmgnfkalvkdrringlfsfikeendtqkhpisqlrlrreleiyqslrvdafketl |
| | | sleekllnkhtslsslenefralleewkkeyaassmvtdehiafiasvrnafchnqypf |
| | | ykealhapiplftvaqptteekdglgiaeallkvlreyceivksqi |
| Prevotella | 9 | meddkkttgsisyelkdkhfwaaflnlarhnvyitinhinklleireidndekvldikt |
| aurantiaca | | lwqkgnkdlnqkarlrelmtkhfpfletaiytknkedkkevkqekqaeaqsleslkd |
| (SEQ ID No. 76) | | clflfldklqearnyyshykysefskepefeegllekmynifgnniqlvindyqhnk |
| | | dinpdedfkhldrkgqfkysfadnegnitesgllffvslflekkdaiwmqqklngfk |
| | | dnlenkkkmthevfcrsrilmpklrlestqtqdwilldmlnelircpkslyerlqgdd |
| | | rekfkvpfdpadedynaeqepfkntlirhqdrfpyfvlryfdyneifknlrfqidlgty |
| | | hfsiykkliggqkedrhlthklygferiqefakqnrpdewkaivkdldtyetsnkryi |
| | | settphyhlenqkigirfrngnkeiwpslktndennekskykldkqyqaeaflsvhe |
| | | llpmmfyylllkkekpnndeinasivegfikreirnifklydafangeinniddleky |
| | | cadkgipkrhlpkqmvailydehkdmvkeakrkqkemvkdtkkllatlekqtqk |
| | | ekeddgrnvkllksgeiarwlyndmmrfqpvqkdnegkpinnskansteyqml |
| | | qrslalynneekptryfrqvnliesnnphpflkwtkweecnniltfyysyltkkiefln |
| | | klkpedwkknqyflklkepktnretivqgwkngfnlprgiftepirewfkrhqnns |
| | | keyekvealdrvglvtkviplffkeeyfkdkeenfkedtqkeindcvqpfynfpyn |
| | | vgnihkpkekdflhreerielwdkkkdkfkgykekikskkltekdkeefrsylefqs |
| | | wnkferelrlvrnqdivtwllckelidklkidelnieelkklrlnnidtdtakkeknnil |
| | | nrvmpmelpvtvyeiddshkivkdkplhtiyikeaetkllkqgnfkalvkdrringl |
| | | fsfvktnseaeskrnpisklrveyelgeyqearieiiqdmlaleeklinkykdlptnkf |
| | | semlnswlegkdeadkarfqndvdfliavrnafshnqypmhnkiefanikpfslyt |
| | | annseekglgianqlkdktkettdkikkiekpietke |
| Prevotella | 10 | medkpfwaaffnlarhnvyltvnhinklldleklydegkhkeiferedifnisddvm |
| saccharolytica | | ndansngkkrkldikkiwddldtdltrkyqlrelilkhfpfiqpaiigaqtkerttidkd |
| (SEQ ID No. 77) | | krststsndslkqtgegdindllslsnvksmffrllqileqlrnyyshvkhsksatmpn |
| | | fdedllnwmryifidsvnkykedyssnsvidpntsfshliykdeqgkikperypfts |
| | | kdgsinafgllffvslflekqdsiwmqkkipgfkkasenymkmtnevfcrnhillp |
| | | kirletvydkdwmlldmlnevvrcplslykrltpaaqnkfkvpekssdnanrqedd |
| | | npfsfilvrhqnrfpyfvlrffdlnevfttlrfqinlgcyhfaickkqigdkkevhhlirtl |
| | | ygfsrlqnftqntrpeewntivkttepssgndgktvqgvplpyisytiphyqieneki |
| | | gikifdgdtavdtdiwpsvstekqlnkpdkytltpgfkadvflsvhellpmmfyyql |
| | | llcegmlktdagnavekvlidtrnaifnlydafvqekintitdlenylqdkpilighlpk |
| | | qmidllkghqrdmlkaveqkkamlikdterrlklldkqlkqetdvaakntgtllkng |
| | | qiadwlvndmmrfqpvkrdkegnpincskansteyqmlqrafafyatdscrlsryf |
| | | tqlhlihsdnshlflsrfeydkqpnliafyaaylkakleflnelqpqnwasdnyflllra |
| | | pkndrqklaegwkngfnlprglftekiktwfnehktivdisdcdifknrvgqvarlip |
| | | vffdkkfkdhsqpfyrydfnvgnvskpteanylskgkreelfksyqnkfknnipae |
| | | ktkeyreyknfslwkkferelrliknqdiliwlmcknlfdekikpkkdilepriavsyi |
| | | kldslqtntstagslnalakvvpmtlaihidspkpkgkagnnekenkeftvyikeegt |
| | | kllkwgnflalladrrikglfsyiehddidlkqhpltkrrvdleldlyqtcridifqqtlgl |
| | | eaqlldkysdlntdnfyqmligwrkkegiprnikedtdflkdvrnafshnqypdsk |
| | | kiafrrirkfnpkelileeeeglgiatqmykevekvvnrikrielfd |
| HMPREF 9 | 11 | mkdilttdttekqnrfyshkiadkyffggyfnlasnniyevfeevnkrntfgklakrd |
| 712_03108 | | ngnlknyiihvfkdelsisdfekrvaifasyfpiletvdkksikernrtidltlsqrirqfr |
| [Myroides | | emlislvtavdqlrnfythyhhsdivienkvldflnssfvstalhvkdkylktdktkefl |
| odoratimimus | | ketiaaeldilieaykkkqiekkntrfkankredilnaiyneafwsfindkdkdkdke |
| CCUG 10230] | | tvvakgadayfeknhhksndpdfalnisekgivyllsffltnkemdslkanitgfkg |
| (SEQ ID No. 78) | | kvdresgnsikymatqriysfhtyrglkqkirtseegvketllmqmidelskvpnvv |
| | | yqhlsttqqnsfiedwneyykdyeddvetddlsrvihpvirkryedrfnyfairflde |
| | | ffdfptlrfqvhlgdyvhdrrtkqlgkvesdriikekvtvfarlkdinsakasyfhslee |
| | | qdkeeldnkwtlfpnpsydfpkehtlqhqgeqknagkigiyvklrdtqykekaale |
| | | earkslnpkersatkaskydiitqiieandnyksekplvftgqpiaylsmndihsmlf |
| | | slltdnaelkktpeeveaklidqigkqineilskdtdtkilkkykdndlketdtdkitrdl |
| | | ardkeeieklileqkqraddynytsstkfnidksrkrkhllfnaekgkigvwlandikr |
| | | fmfkeskskwkgyqhtelqklfayfdtsksdlelilsnmvmvkdypielidlvkks |
| | | rtivdflnkylearleyienvitrvknsigtpqfktvrkecftflkksnytvvsldkqver |
| | | ilsmplfiergfmddkptmlegksykqhkekfadwfvhykensnyqnfydtevy |
| | | eittedkrekakvtkkikqqqkndvftlmmvnymleevlklssndrlslnelyqtke |
| | | erivnkqvakdtgernknyiwnkvvdlqlcdglvhidnvklkdignfrkyendsrv |
| | | kefltyqsdivwsaylsnevdsnklyvierqldnyesirskellkevqeiecsvynqv |
| | | ankeslkqsgnenfkqyvlqgllpigmdvremlilstdvkfkkeeiiqlgqageveq |
| | | dlysliyirnkfahnqlpikeffdfcennyrsisdneyyaeyymeifrsikekyan |
| Prevotella | 12 | meddkkttdsiryelkdkhfwaaflnlarhnvyitvnhinkileedeinrdgyentle |
| intermedia | | nswneikdinkkdrlskliikhfpfleattyrqnptdttkqkeekqaeaqsleslkksff |
| (SEQ ID No. 79) | | vfiyklrdlrnhyshykhskslerpkfeedlqnkmynifdvsiqfvkedykhntdin |
| | | pkkdfkhldrkrkgkfhysfadnegnitesgllffvslflekkdaiwvqkklegfkcs |
| | | nksyqkmtnevfcrsrmllpklrlestqtqdwilldmlnelircpkslyerlqgvnrk |
| | | kfyvsfdpadedydaeqepfkntivrhqdrfpyfalryfdynevfanlrfqidlgtyh |
| | | fsiykkliggqkedrhlthklygferiqefdkqnrpdewkaivkdsdtfkkkeekee |
| | | ekpyisettphyhlenkkigiafknhniwpstqteltnnkrkkynlgtsikaeaflsvh |
| | | ellpmmfyylllktentkndnkvggkketkkqgkhkieaiieskikdiyalydafan |
| | | geinsedelkeylkgkdikivhlpkqmiailknehkdmaekaeakqekmklaten |
| | | rlktldkqlkgkiqngkrynsapksgeiaswlyndmmrfqpvqkdengeslnnsk |
| | | ansteyqllqrtlaffgseherlapyfkqtkliessnphpflndtewekcsnilsfyrsyl |
| | | karknfleslkpedweknqyflmlkepktnretivqgwkngfnlprgfftepirkwf |
| | | mehwksikvddlkrvglvakvtplffsekykdsvqpfynypfnvgdynkpkeed |
| | | flhreerielwdkkkdkfkgykakkkfkemtdkekeehrsylefqswnkferelrl |
| | | vrnqdivtwllctelidklkidelnikelkklrlkdintdtakkeknnilnrvmpmelp |
| | | vtvykynkggyiiknkplhtiyikeaetkllkqgnfkalvkdrringlfsfvktpseae |
| | | sesnpisklrveyelgkyqnarldiiedmlalekklidkynsldtdnfhnmltgwlel |
| | | kgeakkarfqndvklltavrnafshnqypmydenlfgnierfslsssniieskgldia |
| | | aklkeevskaakkiqneednkkeket |
| Capnocytophaga | 13 | mkniqrlgkgnefspfkkedkfyfggflnlannniedffkeiitrfgivitdenkkpk |
| canimorsus | | etfgekilneifkkdisivdyekwvnifadyfpftkylslyleemqfknrvicfrdvm |
| (SEQ ID No. 80) | | kellktvealrnfythydhepikiedrvfyfldkvlldvsltvknkylktdktkeflnqh |
| | | igeelkelckqrkdylvgkgkridkeseiingiynnafkdfickrekqddkenhnsv |
| | | ekilcnkepqnkkqkssatvwelcskssskyteksfpnrendkhclevpisqkgivf |
| | | llsfflnkgeiyaltsnikgfkakitkeepvtydknsirymathrmfsflaykglkrkir |
| | | tseinynedgqasstyeketlmlqmldelnkvpdvvyqnlsedvqktfiedwneyl |
| | | kenngdvgtmeeeqvihpvirkryedkfnyfairfldefaqfptlrfqvhlgnylcd |
| | | krtkqicdttterevkkkitvfgrlselenkkaiflnereeikgwevfpnpsydfpken |
| | | isvnykdfpivgsildrekqpvsnkigirvkiadelqreidkaikekklrnpknrkan |
| | | qdekqkerlvneivstnsneqgepvvfigqptaylsmndihsvlyeflinkisgeale |
| | | tkivekietqikqiigkdattkilkpytnansnsinrekllrdleqeqqilktlleeqqqre |
| | | kdkkdkkskrkhelypsekgkvavwlandikrfmpkafkeqwrgyhhsllqkyl |
| | | ayyeqskeelknllpkevfkhfpfklkgyfqqqylnqfytdylkrrlsyvnelllniq |
| | | nfkndkdalkatekecfkffrkqnyiinpiniqiqsilvypiflkrgfldekptmidre |
| | | kfkenkdteladwfmhyknykednyqkfyayplekveekekfkrnkqinkqkk |
| | | ndvytlmmveyiiqkifgdkfveenplvlkgifqskaerqqnnthaattqernlngil |
| | | nqpkdikiqgkitvkgvklkdignfrkyeidqrvntfldyeprkewmaylpndwk |
| | | ekekqgqlppnnvidrqiskyetvrskillkdvqelekiisdeikeehrhdlkqgkyy |
| | | nfkyyilngllrqlknenvenykvfklntnpekvnitqlkqeatdleqkafvltyirnk |
| | | fahnqlpkkefwdycqekygkiekektyaeyfaevfkrekealik |
| Porphyromonas | 14 | mteqserpyngtyytledkhfwaaflnlarhnayitlthidrqlayskaditndqdvls |
| gulae | | fkalwknfdndlerksrlrslilkhfsflegaaygkklfeskssgnkssknkeltkkek |
| (SEQ ID No. 81) | | eelqanalsldnlksilfdflqklkdfrnyyshyrhsgsselplfdgnmlqrlynvfdv |
| | | svqrvkidhehndevdphyhfnhlvrkgkkdryghndnpsfkhhfvdgegmvt |
| | | eagllffvslflekrdaiwmqkkirgfkggtetyqqmtnevfcrsrislpklkleslrm |
| | | ddwmlldmlnelvrcpkplydrlreddracfrvpvdilpdeddtdgggedpfkntl |
| | | vrhqdrfpyfalryfdlkkvftslrfhidlgtyhfaiykkmigeqpedrhltrnlygfgr |
| | | iqdfaeehrpeewkrlyrdldyfetgdkpyisqtsphyhiekgkiglrfmpegqhl |
| | | wpspevgttrtgrskyaqdkrltaeaflsvhelmpmmfyyfllrekyseevsaervq |
| | | grikrviedvyavydafardeintrdeldacladkgirrghlprqmiailsqehkdme |
| | | ekirkklqemmadtdhrldmldrqtdrkirigrknaglpksgviadwlvrdmmrf |
| | | qpvakdasgkpinnskansteyrmlqralalfggekerltpyfrqmnitggnnphp |
| | | flhetrweshtnilsfyrsylrarkaflefigrsdrvenrpflllkepktdrqtivagwkg |
| | | efhlprgifteavrdcliemghdevasykevgfmakavplyferacedrvqpfyds |
| | | pfnvgnslkpkkgrflskeeraeewergkerfrdleawsysaarriedafagieyasp |
| | | gnkkkieqllrdlslweafesklkvradrinlaklkkeileaqehpyhdfkswqkfer |
| | | elrlvknqdiitwmmcrdlmeenkvegldtgtlylkdirpnvqeqgslnvinrvkp |
| | | mrlpvvvyradsrghvhkeeaplatvyieerdtkllkqgnfksfvkdrringlfsfvd |
| | | tgglameqypisklrveyelakyqtarvcvfeltlrleeslltryphlpdesfremles |
| | | wsdpllakwpelhgkvrlliavrnafshnqypmydeavfssirkydpsspdaieer |
| | | mglniahrlseevkqaketveriiqa |
| Prevotella | 15 | mnipalvenqkkyfgtysvmamlnaqtvldhiqkvadiegeqnennenlwfhp |
| sp. P5-125 | | vmshlynakngydkqpektmfiierlqsyfpflkimaenqreysngkykqnrvev |
| (SEQ ID No. 82) | | nsndifevlkrafgvlkmyrdltnhyktyeeklndgcefltsteqplsgminnyytva |
| | | lrnmnerygyktedlafiqdkrfkfvkdaygkkksqvntgfflslqdyngdtqkklh |
| | | lsgvgialliclfldkqyiniflsrlpifssynaqseerriiirsfginsiklpkdrihseksn |
| | | ksvamdmlnevkrcpdelfttlsaekqsrfriisddhnevlmkrssdrfvplllqyid |
| | | ygklfdhirfhvnmgklryllkadktcidgqtrvrvieqpingfgrleeaetmrkqen |
| | | gtfgnsgifirdfenmkrddanpanypyivdtythyilennkvemfindkedsapll |
| | | pvieddryvvktipscrmstleipamafhmflfgskkteklivdvhnrykrlfqam |
| | | qkeevtaeniasfgiaesdlpqkildlisgnahgkdvdafirltvddmltdterrikrfk |
| | | ddrksirsadnkmgkrgfkqistgkladflakdivlfqpsvndgenkitglnyrimq |
| | | saiavydsgddyeakqqfklmfekarligkgttephpflykvfarsipanavefyer |
| | | ylierkfyltglsneikkgnrvdvpfirrdqnkwktpamktlgriysedlpvelprqm |
| | | fdneikshlkslpqmegidfnnanytyliaeymkrvldddfqtfyqwnrnyrymd |
| | | mlkgeydrkgslqhcftsveereglwkerasrteryrkqasnkirsnrqmrnassee |
| | | ietildkrlsnsrneyqksekvirryrvqdallfllakktlteladfdgerfklkeimpda |
| | | ekgilseimpmsftfekggkkytitsegmklknygdffvlasdkrignllelvgsdiv |
| | | skedimeefnkydqcrpeissivfnlekwafdtypelsarvdreekvdfksilkilln |
| | | nkninkeqsdilrkirnafdhnnypdkgvveikalpeiamsikkafgeyaimk |
| Flavobacterium | 16 | menlnkildkeneiciskifntkgiaapitekaldnikskqkndlnkearlhyfsighs |
| branchiophilum | | fkqidtkkvfdyvlieelkdekplkfitlqkdfftkefsiklqklinsirninnhyvhnf |
| (SEQ ID No. 83) | | ndinlnkidsnvfhflkesfelaiiekyykvnkkypldneivlflkelfikdentallny |
| | | ftnlskdeaieyiltftitenkiwninnehnilniekgkyltfeamlflitiflykneanhl |
| | | lpklydfknnkskqelftffskkftsqdidaeeghlikfrdmiqylnhyptawnndlk |
| | | lesenknkimttklidsiiefelnsnypsfatdiqfkkeakaflfasnkkrnqtsfsnks |
| | | yneeirhnphikqyrdeiasaltpisfnvkedkfkifvkkhvleeyfpnsigyekfle |
| | | yndftekekedfglklysnpktnklieridnhklvkshgrnqdrfmdfsmrflaenn |
| | | yfgkdaffkcykfydtqeqdeflqsnennddvkfhkgkvttyikyeehlknysyw |
| | | dcpfveennsmsvkisigseekilkiqrnlmiyflenalynenvenqgyklvnnyy |
| | | relkkdveesiasldliksnpdflcskykkilpkrllhnyapakqdkapenafetllkk |
| | | adfreeqykkllkkaeheknkedfvkrnkgkqfklhfirkacqmmyfkekyntlk |
| | | egnaafekkdpviekrknkehefghhknlnitreefndyckwmfafngndsykk |
| | | ylrdlfsekhffdnqeyknlfessvnleafyaktkelfkkwietnkptnnenrytleny |
| | | knlilqkqvfinvyhfskylidknllnsennviqykslenveylisdfyfqsklsidqy |
| | | ktcgklfnklksnkledcllyeiaynyidkknvhkidiqkiltskiiltindantpykis |
| | | vpfnklerytemiaiknqnnlkarflidlplylsknkikkgkdsagyeiiikndleied |
| | | intinnkiindsvkftevlmelekyfilkdkcilsknyidnseipslkqfskvwikene |
| | | neiinyrniachfhlplletfdnlllnveqkfikeelqnvstindlskpqeylillfikfkh |
| | | nnfylnlfnknesktikndkevkknrvlqkfinqvilkkk |
| Myroides | 17 | mkdilttdttekqnrfyshkiadkyffggyfnlasnniyevfeevnkrntfgklakrd |
| odoratimimus | | ngnlknyiihvfkdelsisdfekrvaifasyfpiletvdkksikernrtidltlsqrirqfr |
| (SEQ ID No. 84) | | emlislvtavdqlrnfythyhhsdivienkvldflnssfvstalhvkdkylktdktkefl |
| | | ketiaaeldilieaykkkqiekkntrfkankredilnaiyneafwsfindkdkdkdke |
| | | tvvakgadayfeknhhksndpdfalnisekgivyllsffltnkemdslkanitgfkg |
| | | kvdresgnsikymatqriysfhtyrglkqkirtseegvketllmqmidelskvpnvv |
| | | yqhlsttqqnsfiedwneyykdyeddvetddlsrvthpvirkryedrfnyfairflde |
| | | ffdfptlrfqvhlgdyvhdrrtkqlgkvesdriikekvtvfarlkdinsakasyfhslee |
| | | qdkeeldnkwtlfpnpsydfpkehtlqhqgeqknagkigiyvklrdtqykekaale |
| | | earkslnpkersatkaskydiitqiieandnyksekplvftgqpiaylsmndihsmlf |
| | | slltdnaelkktpeeveaklidqigkqineilskdtdtkilkkykdndlketdtdkitrdl |
| | | ardkeeieklileqkqraddynytsstkfnidksrkrkhllfnaekgkigvwlandikr |
| | | fmfkeskskwkgyqhielqklfayfdtsksdlelilsnmvmvkdypielidlvkks |
| | | rtivdflnkylearleyienvitrvknsigtpqfktvrkecftflkksnytvvsldkqver |
| | | ilsmplfiergfmddkptmlegksykqhkekfadwfvhykensnyqnfydtevy |
| | | eittedkrekakvtkkikqqqkndvftlmmvnymleevlklssndrlslnelyqtke |
| | | erivnkqvakdtqernknyiwnkvvdlqcdglvhidnvklkdignfrkyendsrv |
| | | kefltyqsdivwsaylsnevdsnklyvierqldnyesirskellkevqeiecsvynqv |
| | | ankeslkqsgnenfkqyvlqgllpigmdvremlilstdvkfkkeeiiqlgqageveq |
| | | dlysliyirnkfahnqlpikeffdfcennyrsisdneyyaeyymeifrsikekyan |
| Flavobacterium | 18 | mssknesynkqktfnhykqedkyffggflnnaddnlrqvgkefktrinfnhnnnel |
| columnare | | asvfkdyfnkeksvakrehalnllsnyfpvleriqkhtnhnfeqtreifellldtikklrd |
| (SEQ ID No. 85) | | yythhyhkpitinpkiydflddtlldvlitikkkkvkndtsrellkeklrpeltqlknqk |
| | | reelikkgkklleenlenavfnhclipfleenktddkqnktvslrkyrkskpneetsitl |
| | | tqsglvflmsfflhrkefqvftsglerfkakvntikeeeislnknnivymithwsysyy |
| | | nfkglkhriktdqgvstleqnntthsltntntkealltqivdylskvpneiyetlsekqq |
| | | kefeedineymrenpenedstfssivshkvirkryenkfnyfamrfldeyaelptlrf |
| | | mvnfgdyikdrqkkilesiqfdseriikkeihlfeklslvteykknvylketsnidlsrf |
| | | plfpnpsyvmannnipfyidsrsnnldeylnqkkkaqsqnkkrnitfekynkeqsk |
| | | daiiamlqkeigvkdlqqrstigllscnelpsmlyevivkdikgaelenkiaqkireq |
| | | yqsirdftldspqkdnipttliktintdssvtfenqpidiprlknalqkeltltqekllnvk |
| | | eheievdnynrnkntykfknqpknkvddkklqrkyvfyrneirqeanwlasdlihf |
| | | mknkslwkgymhnelqsflaffedkkndcialletvfnlkedciltkglknlflkhg |
| | | nfidfykeylklkedflstestflengfiglppkilkkelskrlkyifivfqkrqfiikelee |
| | | kknnlyadainlsrgifdekptmipfkkpnpdefaswfvasyqynnyqsfyeltpd |
| | | iverdkkkkyknlrainkvkiqdyylklmvdtlyqdlfnqpldkslsdfyvskaere |
| | | kikadakayqklndsslwnkvihlslqnnritanpklkdigkykralqdekiatllty |
| | | dartwtyalqkpekenendykelhytalnmelqeyekvrskellkqvqelekkild |
| | | kfydfsnnashpedleiedkkgkrhpnfklyitkallkneseiinlenidieillkyyd |
| | | ynteelkekiknmdedekakiintkenynkitnvlikkalvliiirnkmahnqyppk |
| | | fiydlanrfvpkkeeeyfatyfnrvfetitkelwenkekkdktqv |
| Porphyromonas | 19 | mteqnekpyngtyytledkhfwaaflnlarhnayitlahidrqlayskaditndedil |
| gingivalis | | ffkgqwknldndlerkarlrslilkhfsflegaaygkklfesqssgnksskkkelskke |
| (SEQ ID No. 86) | | keelqanalsldnlksilfdflqklkdfrnyyshyrhpesselplfdgnmlqrlynvfd |
| | | vsvqrvkrdhehndkvdphrhfnhlvrkgkkdkygnndnpffkhhfvdregtvte |
| | | agllffvslflekrdaiwmqkkirgfkggteayqqmtnevfcrsrislpklkleslrtd |
| | | dwmlldmlnelvrcpkslydrlreedrarfrvpvdilsdeddtdgteedpfkntivrh |
| | | qdrfpyfalryfdlkkvftslrfhidlgtyhfaiykknigeqpedrhltrnlygfgriqdf |
| | | aeehrpeewkrlyrdldyfetgdkpyitqttphyhiekgkiglrfvpegqhlwpspe |
| | | vgatrtgrskyaqdkrltaeaflsvhelmpmmfyyfllrekyseevsaekvqgrikr |
| | | viedvyavydafardeintrdeldacladkgirrghlprqmiailsqehkdmeekvr |
| | | kklqemiadtdhrldmldrqtdrkirigrknaglpksgvvadwlvrdmmrfqpva |
| | | kdtsgkplnnskansteyrmlqralalfggekerltpyfrqmnitggnnphpflhetr |
| | | weshtnilsfyrsylearkaflqsigrsdrvenhrflllkepktdrqtlvagwkgefhlp |
| | | rgifteavrdcliemgydevgsykevgfmakavplyferaskdrvqpfydypfnv |
| | | gnslkpkkgrflskekraeewesgkerfrlaklkkeileakehpyhdfkswqkfere |
| | | lrlyknqdiitwmmerdlmeenkvegldtgtlylkdirtdvqeqgslnylnrvkpm |
| | | rlpvvvyradsrghvhkeqaplatvyieerdtkllkqgnfksfvkdrringlfsfvdtg |
| | | alameqypisklrveyelakyqtarvcafeqtleleeslltryphlpdknfrkmlesw |
| | | sdplldkwpdlhgnvrlliavrnafshnqypmydetlfssirkydpsspdaieermg |
| | | lniahrlseevkqakemveriiqa |
| Porphyromonas | 20 | mteqserpyngtyytledkhfwaaflnlarhnayitlthidrqlayskaditndqdvls |
| sp. COT-052 | | fkalwknfdndlerksrlrslilkhfsflegaaygkklfeskssgnkssknkeltkkek |
| | | eelqanalsldnlksilfdflqklkdfrnyyshyrhsesselplfdgnmlqrlynvfdv |
| OH4946 | | svqrvkrdhehndkvdphrhfnhlvrkgkkdryghndnpsfkhhfvdsegmvte |
| (SEQ ID No. 87) | | agllffvslflekrdaiwmqkkirgfkggtetyqqmtnevfcrsrislpklkleslrtdd |
| | | wmlldmlnelvrcpkplydrlreddracfrvpvdilpdeddtdgggedpfkntivr |
| | | hqdrfpyfalryfdlkkvftslrfhidlgtyhfaiykkmigeqpedrhltrnlygfgriq |
| | | dfaeehrpeewkrlyrdldyfetgdkpyisqttphyhiekgkiglrfvpegqhlwps |
| | | pevgttrtgrskyaqdkrltaeaflsvhelmpmmfyyfllrekyseevsaekvqgri |
| | | krviedvyaiydafardeintlkeldacladkgirrghlpkqmigilsqerkdmeek |
| | | vrkklqemiadtdhrldmldrqtdrkirigrknaglpksgviadwlvrdmmrfqpv |
| | | akdtsgkpinnskansteyrmlqralalfggekerltpyfrqmnitggnnphpflhet |
| | | rweshtnilsfyrsylrarkaflefigrsdrvencpflllkepktdrqtivagwkgefhl |
| | | prgifteavrdcliemgydevgsyrevgfmakavplyferacedrvqpfydspfnv |
| | | gnslkpkkgrflskedraeewergkerfrdleawshsaarrikdafagieyaspgnk |
| | | kkieqllrdlslweafesklkvradkinlaklkkeileaqehpyhdfkswqkferelrl |
| | | vknqdiitwmmerdlmeenkvegldtgtlylkdirpnvqeqgslnylnrvkpmrl |
| | | pvvvyradsrghvhkeeaplatvyieerdtkllkqgnfksfvkdrringlfsfvdtggl |
| | | ameqypisklrveyelakyqtarvcvfeltlrleesllsryphlpdesfremleswsdp |
| | | llakwpelhgkvrlliavrnafshnqypmydeavfssirkydpsspdaieermglni |
| | | ahrlseevkqaketveriiqa |
| Prevotella | 21 | meddkktkestnmldnkhfwaaflnlarhnvyitvnhinkvlelknkkdqdiiidn |
| intermedia | | dqdilaikthwekvngdlnkterlrelmtkhfpfletaiytknkedkeevkqekqak |
| (SEQ ID No. 88) | | aqsfdslkhclflfleklqearnyyshykysestkepmlekellkkmynifddniqlv |
| | | ikdyqhnkdinpdedfkhldrteeefnyyfttnkkgnitasgllffvslflekkdaiw |
| | | mqqklrgfkdnreskkkmthevfcrsrmllpklrlestqtqdwilldmlnelircpk |
| | | slyerlqgeyrkkfnvpfdsadedydaeqepfkntivrhqdrfpyfalryfdyneift |
| | | nlrfqidlgtyhfsiykkliggqkedrhlthklygferiqefakqnrtdewkaivkdfd |
| | | tyetseepyisetaphyhlenqkigirfrndndeiwpslktngennekrkykldkqy |
| | | qaeaflsvhellpmmfyylllkkeepnndkknasivegfikreirdiyklydafang |
| | | einniddlekycedkgipkrhlpkqmvailydehkdmaeeakrkqkemvkdtk |
| | | kllatlekqtqgeiedggrnirllksgeiarwlvndmmrfqpvqkdnegnplnnsk |
| | | ansteyqmlqrslalynkeekptryfrqvnlinssnphpflkwtkweecnnilsfyrs |
| | | yltkkieflnklkpedweknqyflklkepktnretivqgwkngfnlprgiftepirew |
| | | fkrhqndseeyekvetldrvglvtkviplffkkedskdkeeylkkdaqkeinncvq |
| | | pfygfpynvgnihkpdekdflpseerkklwgdkkykfkgykakvkskkltdkek |
| | | eeyrsylefqswnkferelrlyrnqdivtwllctelidklkveglnveelkklrlkdidt |
| | | dtakqeknnilnrvmpmqlpvtvyeiddshnivkdrplhtvyieetktkllkqgnfk |
| | | alvkdrringlfsfvdtssetelksnpiskslveyelgeyqnarietikdmllleetliek |
| | | yktlptdnfsdmlngwlegkdeadkarfqndvkllvavrnafshnqypmrnriafa |
| | | ninpfslssadtseekkldianqlkdkthkiikriieiekpietke |
| PIN17_0200 | AFJ07523 | mkmeddkktkestnmldnkhfwaaflnlarhnvyitvnhinkvlelknkkdqdii |
| [Prevotella | | idndqdilaikthwekvngdlnkterlrelmtkhfpfletaiytknkedkeevkqek |
| intermedia 17] | | qakaqsfdslkhclflfleklqearnyyshykysestkepmlekellkkmynifddn |
| (SEQ ID No. 89) | | iqlvikdyqhnkdinpdedfkhldrteeefnyyfttnkkgnitasgllffvslflekkd |
| | | aiwmqqklrgfkdnreskkkmthevfcrsrmllpklrlestqtqdwilldmlnelir |
| | | cpkslyerlqgeyrkkfnvpfdsadedydaeqepfkntivrhqdrfpyfalryfdyn |
| | | eiftnlrfqidlgtyhfsiykkliggqkedrhlthklygferiqefakqnrtdewkaivk |
| | | dfdtyetseepyisetaphyhlenqkigirfrndndeiwpslktngennekrkykld |
| | | kqyqaeaflsvhellpmmfyylllkkeepnndkknasivegfikreirdiyklydaf |
| | | angeinniddlekycedkgipkrhlpkqmvailydehkdmaeeakrkqkemvk |
| | | dtkkllatlekqtqgeiedggrnirllksgeiarwlvndmmrfqpvqkdnegnplnn |
| | | skansteyqmlqrslalynkeekptryfrqvnlinssnphpflkwtkweecnnilsf |
| | | yrsyltkkieflnklkpedweknqyflklkepktnretivqgwkngfnlprgiftepir |
| | | ewfkrhqndseeyekvetldrvglvtkviplffkkedskdkeeylkkdaqkeinnc |
| | | vqpfygfpynvgnihkpdekdflpseerkklwgdkkykfkgykakvkskkltdk |
| | | ekeeyrsylefqswnkferelrlyrnqdivtwllctelidklkveglnveelkklrlkdi |
| | | dtdtakqeknnilnrvmpmqlpvtvyeiddshnivkdrplhtvyieetktkllkqgn |
| | | fkalvkdrringlfsfvdtssetelksnpiskslveyelgeyqnarietikdmllleetlie |
| | | kyktlptdnfsdmlngwlegkdeadkarfqndvkllvavrnafshnqypmrnriaf |
| | | aninpfslssadtseekkldianqlkdkthkiikriieiekpietke |
| Prevotella | BAU18623 | meddkkttdsisyelkdkhfwaaflnlarhnvyitvnhinkvlelknkkdqdiiidn |
| intermedia | | dqdilaikthwekvngdlnkterlrelmtkhfpfletaiysknkedkeevkqekqak |
| (SEQ ID No. 90) | | aqsfdslkhclflfleklqetrnyyshykysestkepmlekellkkmynifddniqlv |
| | | ikdyqhnkdinpdedfkhldrteedfnyyftrnkkgnitesgllffvslflekkdaiw |
| | | mqqklrgfkdnreskkkmthevfcrsrmllpklrlestqtqdwilldmlnelircpk |
| | | slyerlqgedrekfkvpfdpadedydaeqepfkntlvrhqdrfpyfalryfdyneift |
| | | nlrfqidlgtfhfsiykkliggqkedrhlthklygferiqefakqnrpdewkaivkdld |
| | | tyetsneryisettphyhlenqkigirfrndndeiwpslktngennekskykldkqyq |
| | | aeaflsvhellpmmfyylllkkeepnndkknasivegfikreirdmyklydafang |
| | | einniddlekycedkgipkrhlpkqmvailydehkdmvkeakrkqrkmvkdtek |
| | | llaalekqtqektedggrnirllksgeiarwlvndmmrfqpvqkdnegnplnnska |
| | | nsteyqmlqrslalynkeekptryfrqvnlinssnphpflkwtkweecnnilsfyrsy |
| | | ltkkieflnklkpedweknqyflklkepktnretivqgwkngfnlprgiftepirewf |
| | | krhqndskeyekvealdrvglvtkviplffkkedskdkeedlkkdaqkeinncvqp |
| | | fysfpynvgnihkpdekdflhreerielwdkkkdkfkgykakvkskkltdkekee |
| | | yrsylefqswnkferelrlyrnqdivtwllctelidklkveglnveelldclrlkdidtdta |
| | | kqeknnilnrvmpmqlpvtvyeiddshnivkdrplhtvyieetktkllkqgnfkalv |
| | | kdrringlfsfvdtsseaelksnpiskslveyelgeyqnarietikdmllleetliekyk |
| | | nlptdnfsdmlngwlegkdeadkarfqndvkllvavrnafshnqypmrnriafani |
| | | npfslssadtseekkldianqlkdkthkiikriieiekpietke |
| HMPREF6 | EFU31981 | mqkqdklfvdrkknaifafpkyitimenkekpepiyyeltdkhfwaaflnlarhnv |
| 485_0083 | | yttinhinrrleiaelkddgymmgikgswneqakkldkkvrlrdlimkhfpfleaaa |
| [Prevotella | | yemtnskspnnkeqrekeqsealslnnlknvlfifleklqvlrnyyshykyseespk |
| buccae | | pifetsllknmykvfdanvrlvkrdymhhenidmqrdfthlnrkkqvgrtkniids |
| ATCC 33574] | | pnfhyhfadkegnmtiagllffvslfldkkdaiwmqkklkgfkdgrnlreqmtnev |
| (SEQ ID No. 91) | | fcrsrislpklklenvqtkdwmqldmlnelvrcpkslyerlrekdresfkvpfdifsd |
| | | dynaeeepfkntivrhqdrfpyfvlryfdlneifeqlrfqidlgtyhfsiynkrigdede |
| | | vrhlthhlygfariqdfapqnqpeewrklykdldhfetsqepyisktaphyhleneki |
| | | gikfcsahnnlfpslqtdktcngrskfnlgtqftaeaflsvhellpmmfyyllltkdysr |
| | | kesadkvegiirkeisniyaiydafanneinsiadltrrlqntnilqghlpkqmisilkg |
| | | rqkdmgkeaerkigemiddtqrrldllckqtnqkifigkrnagllksgkiadwlvnd |
| | | mmrfqpvqkdqnnipinnskansteyrmlqralalfgsenfrlkayfnqmnlvgn |
| | | dnphpflaetqwehqtnilsfyrnylearkkylkglkpqnwkqyqhflilkvqktnr |
| | | ntivtgwknsfnlprgiftqpirewfekhnnskriydqilsfdrvgfvakaiplyfaee |
| | | ykdnvqpfydypfnignrlkpkkrqfldkkervelwqknkelfknypsekkktdl |
| | | ayldflswkkferelrliknqdivtwlmfkelfnmatveglkigeihlrdidtntanee |
| | | snnilnrimpmklpvktyetdnkgnilkerplatfyieetetkvlkqgnfkalvkdrrl |
| | | nglfsfaettdlnleehpiskisvdlelikyqttrisifemtlglekklidkystlptdsfrn |
| | | mlerwlqckanrpelknyvnsliavrnafshnqypmydatlfaevkkftlfpsvdtk |
| | | kielniapqlleivgkaikeieksenkn |
| HMPREF9 | EGQ18444 | mkeeekgktpvvstynkddkhfwaaflnlarhnvyitvnhinkilgegeinrdgye |
| 144_1146 | | ntlekswneikdinkkdrlskliikhfpflevttyqrnsadttkqkeekqaeaqslesl |
| [Prevotella | | kksffvfiyklrdlrnhyshykhskslerpkfeedlqekmynifdasiqlvkedykh |
| pallens | | ntdikteedfkhldrkgqfkysfadnegnitesgllffvslflekkdaiwvqkklegfk |
| ATCC 700821] | | csnesyqkmtnevfcrsrmllpklrlqstqtqdwilldmlnelircpkslyerlreedr |
| (SEQ ID No. 92) | | kkfrvpieiadedydaeqepfknalvrhqdrfpyfalryfdyneiftnlrfqidlgtyh |
| | | fsiykkqigdykeshhlthklygferiqeftkqnrpdewrkfvktfnsfetskepyip |
| | | ettphyhlenqkigirfrndndkiwpslktnseknekskykldksfqaeaflsvhell |
| | | pmmfyylllktentdndneietkkkenkndkqekhkieeiienkiteiyalydafan |
| | | gkinsidkleeyckgkdieighlpkqmiailksehkdmateakrkqeemladvqk |
| | | slesldnqineeienverknsslksgeiaswlvndmmrfqpvqkdnegnplnnsk |
| | | ansteyqmlqrslalynkeekptryfrqvnliessnphpflnntewekcnnilsfyrs |
| | | yleakknfleslkpedweknqyflmlkepktncetivqgwkngfnlprgiftepirk |
| | | wfmehrknitvaelkrvglvakviplffseeykdsvqpfynylfnvgninkpdekn |
| | | flnceerrellrkkkdefkkmtdkekeenpsylefqswnkferelrlyrnqdivtwll |
| | | cmelfnkkkikelnvekiylknintnttkkeknteekngeekiikeknnilnrimp |
| | | mrlpikvygrenfsknkkkkirrntfftvyieekgtkllkqgnfkalerdrrlgglfsfv |
| | | kthskaesksntisksrveyelgeyqkarieiikdmlaleetlidkynsldtdnfhnml |
| | | tgwlklkdepdkasfqndvdlliavrnafshnqypmrnriafaninpfslssantsee |
| | | kglgianqlkdkthktiekiieiekpietke |
| HMPREF9 | EH008761 | mkdilttdttekqnrfyshkiadkyffggyfnlasnniyevfeevnkrntfgklakrd |
| 714_02132 | | ngnlknyiihvfkdelsisdfekrvaifasyfpiletvdkksikernrtidltlsqrirqfr |
| [Myroides | | emlislvtavdqlrnfythyhhseivienkvldflnsslvstalhvkdkylktdktkefl |
| odoratimimus | | ketiaaeldilieaykkkqiekkntrfkankredilnaiyneafwsfindkdkdketv |
| CCUG 12901] | | vakgadayfeknhhksndpdfalnisekgivyllsffltnkemdslkanitgfkgkv |
| (SEQ ID No. 93) | | dresgnsikymatqriysfhtyrglkqkirtseegvketllmqmidelskvpnvvyq |
| | | hlsttqqnsfiedwneyykdyeddvetddlsrvihpvirkryedrfnyfairfldeffd |
| | | fptlrfqvhlgdyvhdrrtkqlgkvesdriikekvtvfarlkdinsakanyfhsleeqd |
| | | keeldnkwtlfpnpsydfpkehtlqhqgeqknagkigiyvklrdtqykekaaleea |
| | | rkslnpkersatkaskydiitqiieandnvksekplvftgqpiaylsmndihsmlfsll |
| | | tdnaelkktpeeveaklidqigkqineilskdtdtkilkkykdndlketdtdkitrdlar |
| | | dkeeieklileqkqraddynytsstkfnidksrkrkhllfnaekgkigvwlandikrf |
| | | mteefkskwkgyqhtelqklfayydtsksdldlilsdmvmvkdypielialvkksrt |
| | | lvdflnkylearlgymenvitrvknsigtpqfktvrkecftflkksnytvvsldkqver |
| | | ilsmplfiergfmddkptmlegksyqqhkekfadwfvhykensnyqnfydtevy |
| | | eittedkrekakvtkkikqqqkndvftlmmvnymleevlklssndrlslnelyqtke |
| | | erivnkqvakdtqernknyiwnkvvdqlceglvridkvklkdignfrkyendsrv |
| | | kefltyqsdivwsaylsnevdsnklyvierqldnyesirskellkevqeiecsvynqv |
| | | ankeslkqsgnenfkqyvlqglvpigmdvremlilstdvkfikeeiiqlgqageveq |
| | | dlysliyirnkfahnqlpikeffdfcennyrsisdneyyaeyymeifrsikekyts |
| HMPREF9 | EKB06014 | mkdilttdttekqnrfyshkiadkyffggyfnlasnniyevfeevnkrntfgklakrd |
| 711_00870 | | ngnlknyiihvfkdelsisdfekrvaifasyfpiletvdkksikernrtidltlsqrirqfr |
| [Myroides | | emlislvtavdqlrnfythyhhseivienkvldflnsslvstalhvkdkylktdktkefl |
| odoratimimus | | ketiaaeldilieaykkkqiekkntrfkankredilnaiyneafwsfindkdkdketv |
| CCUG 3837] | | vakgadayfeknhhksndpdfalnisekgivyllsffltnkemdslkanitgfkgkv |
| (SEQ ID No. 94) | | dresgnsikymatqriysfhtyrglkqkirtseegvketllmqmidelskvpnvvyq |
| | | hlsttqqnsfiedwneyykdyeddvetddlsrvihpvirkryedrfnyfairfldeffd |
| | | fptlrfqvhlgdyvhdrrtkqlgkvesdriikekvtvfarlkdinsakasyfhsleeqd |
| | | keeldnkwtlfpnpsydfpkehtlqhqgeqknagkigiyvklrdtqykekaaleea |
| | | rkslnpkersatkaskydiitqiieandnvksekplvftgqpiaylsmndihsmlfsll |
| | | tdnaelkktpeeveaklidqigkqineilskdtdtkilkkykdndlketdtdkitrdlar |
| | | dkeeieklileqkqraddynytsstkfnidksrkrkhllfnaekgkigvwlandikrf |
| | | mfkeskskwkgyqhtelqklfayfdtsksdlelilsdmvmvkdypielidlvrksrt |
| | | lvdflnkylearlgyienvitrvknsigtpqfktvrkecfaflkesnytvasldkqieril |
| | | smplfiergfmdskptmlegksyqqhkedfadwfvhykensnyqnfydtevyei |
| | | itedkreqakvtkkikqqqkndvftlmmvnymleevlklpsndrlslnelyqtkee |
| | | rivnkqvakdtgernknyiwnkvvdlqlceglvridkvklkdignfrkyendsrvk |
| | | efltyqsdivwsgylsnevdsnklyvierqldnyesirskellkevqeiecivynqva |
| | | nkeslkqsgnenfkqyvlqgllprgtdvremlilstdvkfkkeeimqlgqvreveqd |
| | | lysliyirnkfahnqlpikeffdfcennyrpisdneyyaeyymeifrsikekyas |
| HMPREF9 | EKB54193 | menktslgnniyynpfkpqdksyfagyfnaamentdsvfrelgkrlkgkeytsenf |
| 699_02005 | | fdaifkenislveyeryvkllsdyfpmarlldkkevpikerkenfkknfkgiikavrd |
| [Bergeyella | | lrnfythkehgeveitdeifgvldemlkstvltvkkkkvktdktkeilkksiekqldil |
| zoohelcum | | cqkkleylrdtarkieekrrnqrergekelvapfkysdkrddliaaiyndafdvyidk |
| ATCC 43767] | | kkdslkesskakyntksdpqqeegdlkipiskngvvfllslfltkqeihafkskiagfk |
| (SEQ ID No. 95) | | atvideatvseatvshgknsicfmatheifshlaykklkrkvrtaeinygeaenaeqls |
| | | vyaketlmmqmldelskvpdvvygnisedvqktfiedwneylkenngdvgtme |
| | | eeqvihpvirkryedkfnyfairfldefaqfptlrfqvhlgnylhdsrpkenlisdrrik |
| | | ekitvfgrlselehkkalfikntetnedrehyweifpnpnydfpkenisvndkdfpia |
| | | gsildrekqpvagkigikvkllnqqyvsevdkavkahqlkqrkaskpsiqniieeiv |
| | | pinesnpkeaivfggqptaylsmndihsilyeffdkwekkkeklekkgekelrkei |
| | | gkelekkivgkiqaqiqqiidkdtnakilkpyqdgnstaidkeklikdlkqeqnilqk |
| | | lkdeqtvrekeyndfiayqdknreinkvrdrnhkqylkdnlkrkypeaparkevly |
| | | yrekgkvavwlandikrfmptdfknewkgeqhsllqkslayyeqckeelknllpe |
| | | kvfqhlpfklggyfqqkylyqfytcyldkrleyisglvqqaenfksenkvfkkvene |
| | | cfkflkkqnythkeldarvqsilgypiflergfmdekptiikgktfkgnealfadwfr |
| | | yykeyqnfqtfydtenyplvelekkqadrkrktkiyqqkkndvftllmakhifksvf |
| | | kqdsidqfsledlyqsreerlgnqerarqtgerntnyiwnktvdlklcdgkitvenvkl |
| | | knvgdfikyeydqrvqaflkyeeniewqaflikeskeeenypyvvereieqyekvr |
| | | reellkevhlieeyilekvkdkeilkkgdnqnfkyyilngllkqlknedvesykvfnl |
| | | ntepedvninqlkqeatdleqkafvltyirnkfahnqlpkkefwdycqekygkiek |
| | | ektyaeyfaevfkkekealik |
| HMPREF9 | EKY00089 | mmekenvqgshiyyeptdkcfwaafynlarhnayltiahinsfvnskkginnddk |
| 151_01387 | | vldiiddwskfdndllmgarlnklilkhfpflkaplyqlakrktrkqqgkeqqdyek |
| [Prevotella | | kgdedpeviqeaianafkmanvrktlhaflkqledlrnhfshynynspakkmevk |
| saccharolytica | | fddgfcnklyyvfdaalqmvkddnrmnpeinmqtdfehlvrlgrnrkipntfkyn |
| F0055] | | ftnsdgtinnngllffvslflekrdaiwmqkkikgfkggtenymrmtnevfcrnrm |
| (SEQ ID No. 96) | | vipklrletdydnhqlmfdmlnelvrcplslykrlkqedqdkfrvpiefldednead |
| | | npygenansdenpteetdplkntivrhqhrfpyfvlryfdlnevfkqlrfqinlgcyh |
| | | fsiydktigertekrhltrtlfgfdrlqnfsvklqpehwknmvkhldteessdkpylsd |
| | | amphyqienekigihflktdtekketvwpsleveevssnrnkykseknitadaflst |
| | | hellpmmfyyqllsseektraaagdkvqgvlqsyrkkifdiyddfangtinsmqkl |
| | | derlakdnllrgnmpqqmlailehqepdmeqkakekldrlitetkkrigkledqfkq |
| | | kvrigkrradlpkvgsiadwlvndmmrfqpakrnadntgvpdskansteyrllqea |
| | | lafysaykdrlepyfrqvnliggtnphpflhrvdwkkenhllsfyhdyleakeqyls |
| | | hlspadwqkhqhflllkvrkdiqnekkdwkkslvagwkngfnlprglftesiktwf |
| | | stdadkvqitdtklfenrvgliakliplyydkvyndkpqpfyqypfnindrykpedtr |
| | | krftaassklwnekkmlyknaqpdssdkieypqyldflswkklerelrmlrnqdm |
| | | mvwlmckdlfaqctvegvefadlklsqlevdvnvqdnlnylnnvssmilplsvyp |
| | | sdaqgnvlrnskplhtvyvqenntkllkqgnfksllkdrringlfsfiaaegedlqqhp |
| | | ltknrleyelsiyqtmrisvfeqtlqlekailtrnkticgnnfnnllnswsehrtdkktlq |
| | | pdidfliavrnafshnqypmstntvmqgiekfniqtpkleekdglgiasqlakktkd |
| | | aasrlqniinggtn |
| A343_1752 | EOA10535 | mteqnekpyngtyytledkhfwaaffnlarhnayitlthidrqlayskaditndedilf |
| [Porphyromonas | | fkgqwknldndlerkarlrslilkhfsflegaaygkklfesqssgnksskkkeltkke |
| gingivalis | | keelqanalsldnlksilfdflqklkdfrnyyshyrhpesselplfdgnmlqrlynvfd |
| JCVI SC001] | | vsvqrvkrdhehndkvdphrhfnhlvrkgkkdrcgnndnpfflchhfvdreekvte |
| (SEQ ID No. 97) | | agllffvslflekrdaiwmqkkirgfkggtetyqqmtnevfcrsrislpklkleslrtdd |
| | | wmlldmlnelvrcpkslydrlreedrarfrvpvdilsdeddtdgteedpfkntlvrhq |
| | | drfpyfalryfdlkkvftslrfhidlgtyhfaiykknigeqpedrhltrnlygfgriqdfa |
| | | eehrpeewkrivrdidyfetgdkpyitqttphyhiekgkigirfvpegqiiwpspev |
| | | gatrtgrskyaqdkrftaeaftsvhelmpmmfyyfflrekyseeasaervqgrikrvi |
| | | edvyavydafargeidtldrldacladkgirrghlprqmiailsgehkdmeekvrkk |
| | | lqemiadtdhrldmidrqtdrkirigrknagipksgviadwivrdmmrfqpvakdt |
| | | sgkplnnskansteyrmlqralalfggekerltpyfrqmnitggnnphpflhetrwe |
| | | shtnilsfyrsylkarkafiqsigrsdrvenhrifilkepktdrqflvagwkgefhlprgi |
| | | fteavrdcliemgldevgsykevgfmakavplyferackdrvqpfydypfnvgnsl |
| | | kpkkgrflskekraeewesgkerfrdleawshsaarriedafagienasrenkkkie |
| | | qllqdislwetfesklkvkadkiniakikkeileakehpyldfkswqkferelrlvkn |
| | | qdiitwmmerdimeenkvegidtgtlylkdirtdvheqgslnvinrvkpmrlpvv |
| | | vyradsrghvhkeqaplatvyieerdtkilkqgnfksfvkdrringlfsfvdtgalam |
| | | eqypisklrveyelakyqtarvcafeqtleleesiltryphipdknfrkmleswsdpll |
| | | dkwpdlhgnvrlliavrnafshnqypmydetlfssirkydpsspdaieermglnia |
| | | hrlseevkqakemveriiqa |
| HMPREF1 | ERI81700 | mesiknsqkstgktlqkdppyfglyinmallnvrkvenhirkwlgdvallpeksgf |
| 981_03090 | | hsllttdnlssakwtrfyyksrkflpflemfdsdkksyenrrettecldtidrqkissllk |
| [Bacteroides | | evygklqdirnafshyhiddqsvkhtaliissemhrfienaysfalqktrarftgvfvet |
| pyogenes F0041] | | dflqaeekgdnkkffaiggnegikikdnaliflicifldreeafkflsratgfkstkekgf |
| (SEQ ID No. 98) | | lavretfcalccrqpherllsvnpreallmdmlnelnrcpdilfemldekdqksflpll |
| | | geeeqahilensindelceaiddpfemiasiskrvryknrfpylmlryieeknllpfir |
| | | fridlgclelasypkkmgeennyersvtdhamafgrltdfhnedavlqqitkgitdev |
| | | rfslyapryaiynnkigfvrtggsdkisfptlkkkggeghcvaytlqntksfgfisiydl |
| | | rkilllsfldkdkaknivsglleqcekhwkdlsenlfdairtelqkefpvplirytlprsk |
| | | ggklvsskladkqekyeseferrkeklteilsekdfdlsqiprrmidewlnvlptsrek |
| | | klkgyvetlkldcrerlrvfekrekgehpvpprigematdlakdiirmvidqgvkqri |
| | | tsayyseiqrclaqyagddnrrhidsiirelrlkdtknghpflgkvlrpglghteklyqr |
| | | yfeekkewleatfypaaspkrvprfvnpptgkqkelpliirnlmkerpewrdwkqr |
| | | knshpidlpsqlfeneicrilkdkigkepsgklkwnemfklywdkefpngmqrfy |
| | | rckrrvevfdkvveyeyseeggnykkyyealidevvrqkissskeksklqvedltis |
| | | vrrvfkrainekeyqlrllceddrllfmavrdlydwkeaqldldkidnmlgepvsvs |
| | | qviqleggqpdavikaecklkdvsklmrycydgrvkglmpyfanheatqeqvem |
| | | elrhyedhrrrvfnwvfaleksvlkneklrrfyeesqggcehrrcidalrkaslvseee |
| | | yeflvhirnksahnqfpdleigklppnvtsgfceciwskykaiicriipfidperrffgk |
| | | lleqk |
| HMPREF1 | ERJ65637 | mntvpasenkgqsrtveddpqyfglylnlarenlieveshvrikfgkkklneeslkq |
| 553_02065 | | sllcdhllsvdrwtkvyghsrrylpflhyfdpdsqiekdhdsktgvdpdsaqrlirely |
| [Porphyromonas | | slldflrndfshnrldgttfehlevspdissfitgtyslacgraqsrfadffkpddfvlakn |
| gingivalis F0568] | | rkeqlisvadgkecltvsglafficlfldreqasgmlsrirgfkrtdenwaravhetfcd |
| (SEQ ID No. 99) | | lcirhphdrlessntkeallldmlnelnrcprilydmlpeeeraqflpaldensmnnls |
| | | enslneesrllwdgssdwaealtkrirhqdrfpylmlrfieemdllkgirfrvdlgeiel |
| | | dsyskkvgrngeydrtitdhalafgklsdfqneeevsrmisgeasypvrfslfaprya |
| | | iydnkigychtsdpvypksktgekralsnprsmgfisvhdlrklllmellcegsfsrm |
| | | qsdflrkanrildetaegklqfsalfpemrhrfippqnpkskdrrekaettlekykqei |
| | | kgrkdklnsqllsafdmdqrqlpsrlldewmnirpashsvklrtyvkqlnedcrlrlq |
| | | kfrkdgdgkaraiplvgematflsqdivrmiiseetkklitsayynemqrslaqyag |
| | | eenrhqfraivaelrlldpssghpflsatmetahrytedfykcylekkrewlaktfyrp |
| | | eqdentkrrisvffvpdgearkllpllirrrmkeqndlqdwirnkqahpidlpshlfds |
| | | kimellkykdgkkkwneafkdwwstkypdgmqpfyglrrelnihgksysyips |
| | | dgkkfadcythlmektvqdkkrelrtagkpvppdlaadikrsfhravnerefmlrlv |
| | | qeddrlmlmainkmmtdreedilpglknidsildeenqfslavhakvlekegegg |
| | | dnslslvpatieikskrkdwskyiryrydrrvpglmshfpehkatldevktllgeydr |
| | | crikifdwafalegaimsdrdlkpylhesssregksgehstivkmlvekkgcltpde |
| | | sqylilirnkaahnqfpcaaempliyrdvsakvgsiegssakdlpegsslvdslwkk |
| | | yemiirkilpildpenrffgkllnnmsqpindl |
| HMPREF1 | ERJ81987 | mntvpasenkgqsrtveddpqyfglylnlarenlieveshvrikfgkkklneeslkq |
| 988_01768 | | sllcdhllsvdrwtkvyghsrrylpflhyfdpdsqiekdhdsktgvdpdsaqrlirely |
| [Porphyromonas | | slldflrndfshnrldgttfehlevspdissfitgtyslacgraqsrfadffkpddfvlakn |
| gingivalis F0185] | | rkeqlisvadgkecltvsglafficlfldreqasgmlsrirgfkrtdenwaravhetfcd |
| (SEQ ID No. 100) | | lcirhphdrlessntkeallldmlnelnrcprilydmlpeeeraqflpaldensmnnls |
| | | enslneesrllwdgssdwaealtkrirhqdrfpylmlrfieemdllkgirfrvdlgeiel |
| | | dsyskkvgrngeydrtitdhalafgklsdfqneeevsrmisgeasypvrfslfaprya |
| | | iydnkigychtsdpvypksktgekralsnpqsmgfisvhdlrklllmellcegsfsr |
| | | mqsgflrkanrildetaegklqfsalfpemrhrfippqnpkskdrrekaettlekykq |
| | | eikgrkdklnsqllsafdmnqrqlpsrlldewmnirpashsvklrtyvkqlnedcrlr |
| | | lrkfrkdgdgkaraiplvgematflsqdivrmiiseetkklitsayynemqrslaqya |
| | | geenrrqfraivaelhlldpssghpflsatmetahrytedfykcylekkrewlaktfyr |
| | | peqdentkrrisvffvpdgearkllpllirrrmkeqndlqdwirnkqahpidlpshlf |
| | | dskimellkvkdgkkkwneafkdwwstkypdgmqpfyglrrelnihgksvsyi |
| | | psdgkkfadcythlmektvqdkkrelrtagkpvppdlaadikrsfhravnerefmlr |
| | | lvqeddrlmlmainkmmtdreedilpglknidsildeenqfslavhakvlekegeg |
| | | gdnslslvpatieikskrkdwskyiryrydrrvpglmshfpehkatldevktllgeyd |
| | | rcrikifdwafalegaimsdrdlkpylhesssregksgehstivkmlvekkgcltpde |
| | | sqylilirnkaahnqfpcaaempliyrdvsakvgsiegssakdlpegsslvdslwkk |
| | | yemiirkilpildhenrffgkllnnmsqpindl |
| HMPREF1 | ERJ87335 | mntvpasenkgqsrtveddpqyfglylnlarenlieveshvrikfgkkklneeslkq |
| 990_01800 | | sllcdhllsvdrwtkvyghsrrylpflhyfdpdsqiekdhdsktgvdpdsaqrlirely |
| [Porphyromonas | | slldflrndfshnrldgttfehlevspdissfitgtyslacgraqsrfadffkpddfvlakn |
| gingivalis W4087] | | rkeqlisvadgkecltvsglafficlfldreqasgmlsrirgfkrtdenwaravhetfcd |
| (SEQ ID No. 101) | | lcirhphdrlessntkeallldmlnelnrcprilydmlpeeeraqflpaldensmnnls |
| | | enslneesrllwdgssdwaealtkrirhqdrfpylmlrfieemdllkgirfrvdlgeiel |
| | | dsyskkvgrngeydrtitdhalafgklsdfqneeevsrmisgeasypvrfslfaprya |
| | | iydnkigychtsdpvypksktgekralsnprsmgfisvhdlrklllmellcegsfsrm |
| | | qsdflrkanrildetaegklqfsalfpemrhrfippqnpkskdrrekaettlekykqei |
| | | kgrkdklnsqllsafdmdqrqlpsrlldewmnirpashsvklrtyvkqlnedcrlrlq |
| | | kfrkdgdgkaraiplvgematflsqdivrmiiseetkklitsayynemqrslaqyag |
| | | eenrhqfraivaelrlldpssghpflsatmetahrytedfykcylekkrewlaktfyrp |
| | | eqdentkrrisvffvpdgearkllpllirrrmkeqndlqdwirnkqahpidlpshlfds |
| | | kvmellkvkdgkkkwneafkdwwstkypdgmqpfyglrrelnihgksvsyips |
| | | dgkkfadcythlmektvrdkkrelrtagkpvppdlaayikrsfhravnerefmlrlv |
| | | qeddrlmlmainkimtdreedilpglknidsildkenqfslavhakvlekegeggd |
| | | nslslvpatieikskrkdwskyiryrydrrvpglmshfpehkatldevktllgeydrcr |
| | | ikifdwafalegaimsdrdlkpylhesssregksgehstivkmlvekkgcltpdesq |
| | | ylilirnkaahnqfpcaaeipliyrdvsakvgsiegssakdlpegsslvdslwkkye |
| | | miirkilpildpenrffgkllnnmsqpindl |
| M573_117042 | KJJ86756 | mkmeddkkttestnmldnkhfwaaflnlarhnvyitvnhinkvlelknkkdqdiii |
| [Prevotella | | dndqdilaikthwekvngdlnkterlrelmtkhfpfletaiytknkedkeevkqekq |
| intermedia ZT] | | aeaqsleslkdclflfleklqearnyyshykysestkepmleegllekmynifddniq |
| (SEQ ID No. 102) | | lvikdyqhnkdinpdedfkhldrkgqfkysfadnegnitesgllffvslflekkdaiw |
| | | mqqkltgfkdnreskkkmthevfcrrrmllpklrlestqtqdwilldmlnelircpks |
| | | lyerlqgeyrkkfnvpfdsadedydaeqepfkntivrhqdrfpyfalryfdyneiftn |
| | | lrfqidlgtyhfsiykkliggqkedrhlthklygferiqefakqnrpdewkalvkdldt |
| | | yetsneryisettphyhlenqkigirfrngnkeiwpslktngennekskykldkpyq |
| | | aeaflsvhellpmmfyylllkkeepnndkknasivegfikreirdmyklydafang |
| | | einnigdlekycedkgipkrhlpkqmvailydepkdmvkeakrkqkemvkdtk |
| | | kllatlekqtqeeiedggrnirllksgeiarwlvndmmrfqpvqkdnegnplnnska |
| | | nsteyqmlqrslalynkeekptryfrqvnlinssnphpflkwtkweecnnilsfyrn |
| | | yltkkieflnklkpedweknqyflklkepktnretlvqgwkngfnlprgiftepirew |
| | | fkrhqndskeyekvealkrvglvtkviplffkeeyfkedaqkeinncvqpfysfpyn |
| | | vgnihkpdekdflpseerkklwgdkkdkfkgykakvkskkltdkekeeyrsylef |
| | | qswnkferelrlyrnqdivtwllctelidkmkveglnveelqklrlkdidtdtakqek |
| | | nnilnrimpmqlpvtvyeiddshnivkdrplhtvyieetktkllkqgnfkalvkdrrl |
| | | nglfsfvdtsskaelkdkpisksvveyelgeyqnarietikdmlllektlikkyeklpt |
| | | dnfsdmlngwlegkdesdkarfqndvkllvavrnafshnqypmrnriafaninpf |
| | | slssadiseekkldianqlkdkthkiikkiieiekpietke |
| A2033_10205 | OFX18020.1 | menqtqkgkgiyyyytknedkhyfgsflnlannnieqiieefrirlslkdeknikeii |
| [Bacteroidetes | | nnyftdkksytdwerginilkeylpvidyldlaitdkefekidlkqketakrkyfrtnf |
| bacterium | | sllidtiidlrnfythyfhkpisinpdvakfldknllnycldikkqkmktdktkqalkd |
| GWA2_31_9] | | gldkelkklielkkaelkekkiktwnitenvegavyndafnhmvyknnagvtilkd |
| (SEQ ID No. 103) | | yhksilpddkidselklnfsisglvfllsmflskkeieqfksnlegfkgkvigengeye |
| | | iskfnnslkymathwifsyltfkglkqrvkntfdketllmqmidelnkvphevyqtl |
| | | skeqqnefledineyvqdneenkksmensivvhpvirkryddkfnyfairfldefa |
| | | nfptlkffvtagnfvhdkrekqiqgsmltsdrmikekinvfgklteiakyksdyfsne |
| | | ntletsewelfpnpsylliqnnipvhidlihnteeakqcqiaidrikettnpakkrntrk |
| | | skeeiikiiyqknknikygdptallssnelpaliyellvnkksgkeleniivekivnqy |
| | | ktiagfekgqnlsnslitkklkksepnedkinaekiilainreleitenklniiknnraef |
| | | rtgakrkhifyskelgqeatwiaydlkrfmpeasrkewkgfhhselqkflafydrnk |
| | | ndakallnmfwnfdndqligndlnsafrefhfdkfyekylikrdeilegfksfisnfk |
| | | depkllkkgikdiyrvfdkryyiikstnaqkeqllskpiclprgifdnkptyiegvkve |
| | | snsalfadwyqytysdkhefqsfydmprdykeqfekfelnniksiqnkknlnksd |
| | | kfiyfrykqdlkikqiksqdlfiklmvdelfnvvfknnielnlkklyqtsderfknqli |
| | | advqknrekgdtsdnkmnenfiwnmtiplslcngqieepkvklkdigkfrkletdd |
| | | kviqlleydkskvwkkleiedelenmpnsyerirrekllkgiqefehfllekekfdgi |
| | | nhpkhfeqdlnpnfktyvingvlrknsklnyteidklldlehisikdietsakeihlayf |
| | | lihvrnkfghnqlpkleafelmkkyykknneetyaeyfhkvssqivnefknslekh |
| | | s |
| SAMN054 | SDI27289.1 | mektqtglgiyydhtklqdkyffggffnlaqnnidnvikafiikffperkdkdiniaq |
| 21542_0666 | | fldicfkdndadsdfqkknkflrihfpvigfltsdndkagfkkkfalllktiselrnfyth |
| [Chryseobacterium | | yyhksiefpselfellddifvkttseikklkkkddktqqllnknlseeydiryqqqierl |
| jejuense] | | kelkaqgkrvsltdetairngvfnaafnhliyrdgenvkpsrlyqssysepdpaengi |
| (SEQ ID No. 104) | | slsqnsilfllsmflerketedlksrvkgfkakiikqgeeqisglkfmathwvfsylcf |
| | | kgikqklstefheetlliqiidelskvpdevysafdsktkekfledineymkegnadls |
| | | ledskvihpvirkryenkfnyfairfldeylsstslkfqvhvgnyvhdrrvkhingtgf |
| | | qterivkdrikvfgrlsnisnlkadyikeqlelpndsngweifpnpsyifidnnvpih |
| | | vladeatkkgielfkdkrrkeqpeelqkrkgkiskynivsmiykeakgkdklridep |
| | | lallslneipallyqilekgatpkdieliiknklterfekiknydpetpapasqiskrlrnn |
| | | ttakgqealnaeklslliereientetklssieekrlkakkeqrrntpqrsifsnsdlgriaa |
| | | wladdikrfmpaeqrknwkgyqhsqlqqslayfekrpqeaflllkegwdtsdgss |
| | | ywnnwymnsflennhfekfyknylmkrykyfselagnikqhthntkflrkfikqq |
| | | mpadlfpkrhyilkdleteknkvlskplvfsrglfdnnptfikgvkvtenpelfaewy |
| | | sygyktehvfqhfygwerdynelldselqkgnsfaknsiyynresqldliklkqdlki |
| | | kkikiqdlflkriaeklfenvfnypttlsldefyltqeeraekerialaqslreegdnspni |
| | | ikddfiwsktiafrskqiyepaiklkdigkfnrfvlddeeskaskllsydknkiwnke |
| | | qlerelsigensyevirreklfkeignielqilsnwswdginhprefemedqkntrhp |
| | | nfkmylvngilrkninlykededfwleslkendflalpsevletksemvqllflvilir |
| | | nqfahnqlpeiqfynfirknypeiqnntvaelylnliklavqklkdns |
| SAMN054 | SHM52812.1 | mntrvtgmgvsydhtkkedkhffggflnlaqdnitavikafcikfdknpmssvqfa |
| 44360_11366 | | escftdkdsdtdfqnkvryvrthlpvigylnyggdrntfrqklstllkavdslrnfythy |
| [Chryseobacterium | | yhsplalstelfelldtvfasvavevkqhkmkddktrqllskslaeeldirykqqlerlk |
| carnipullorum] | | elkeqgknidlrdeagirngvinaafnhliykegeiakptlsyssfyygadsaengiti |
| (SEQ ID No. 105) | | sqsgllfllsmflgkkeiedlksrirgfkakivrdgeenisglkfmathwifsylsfkg |
| | | mkqrlstdfheetlliqiidelskvpdevyhdfdtatrekfvedineyiregnedfslg |
| | | dstiihpvirkryenkfnyfavrfldefikfpslrfqvhlgnfvhdrrikdihgtgfqter |
| | | vvkdrikvfgklseisslkteyiekeldldsdtgweifpnpsyvfidnnipiyistnktf |
| | | kngssefiklrrkekpeemkmrgedkkekrdiasmignagslnsktplamlslne |
| | | mpallyeilvkkttpeeieliikekldshfeniknydpekplpasqiskrlrnnttdkg |
| | | kkvinpeklihlinkeidateakfallaknrkelkekfrgkplrqtifsnmelgreatwl |
| | | addikrfmpdilrknwkgyqhnqlqqslaffnsrpkeaftilqdgwdfadgssfwn |
| | | gwiinsfvknrsfeyfyeayfegrkeyfsslaenikqhtsnhrnlrrfidqqmpkglf |
| | | enrhyllenleteknkilskplvfprglfdtkptfikgikvdeqpelfaewyqygyste |
| | | hvfqnfygwerdyndlleselekdndfsknsihysrtsqleliklkqdlkikkikiqdl |
| | | flkliaghifenifkypasfsldelyltqeerinkeqealiqsqrkegdhsdniikdnfig |
| | | sktvtyeskqisepnvklkdigkfnrfllddkvktllsynedkvwnkndldlelsige |
| | | nsyevirreklfkkiqnfelqtltdwpwngtdhpeefgttdnkgvnhpnfkmyvv |
| | | ngilrkhtdwfkegednwlenlnethfknlsfqeletksksiqtafliimirnqfahnq |
| | | lpavqffefiqkkypeiqgsttselylnfinlavvellellek |
| SAMN054 | SIS70481.1 | metqilgngisydhtktedkhffggflntaqnnidllikayiskfessprklnsvqfpd |
| 21786_1011119 | | vcfkkndsdadfqhklqfirkhlpviqylkyggnrevlkekfrlllqavdslrnfythf |
| [Chryseobacterium | | yhkpiqlpnelltlldtifgeignevrqnkmkddktrhllkknlseeldfryqeqlerlr |
| ureilyticum] | | klksegkkvdlrdteairngvinaafnhlifkdaedfkptvsyssyyydsdtaengisi |
| (SEQ ID No. 106) | | sqsgllfllsmflgrremedlksrvrgfkariikheeqhvsglkfmathwvfsefcfk |
| | | giktrlnadyheetlliqlidelskvpdelyrsfdvatrerfiedineyirdgkedkslies |
| | | kivhpvirkryeskfnyfairfldefvnfptlrfqvhagnyvhdrriksiegtgfkterl |
| | | vkdrikvfgklstisslkaeylakavnitddtgwellphpsyvfidnnipihltvdpsf |
| | | kngvkeyqekrklqkpeemknrqggdkmhkpaisskigkskdinpespvalls |
| | | mneipallyeilvkkaspeeveakirqkltavferirdydpkvplpasqvskrlrnnt |
| | | dtlsynkeklvelankeveqterklalitknrrecrekvkgkfkrqkvfknaelgteat |
| | | wlandikrfmpeeqkknwkgyqhsqlqqslaffesrpgearsllqagwdfsdgssf |
| | | wngwvmnsfardntfdgfyesylngrmkyflrladniaqqsstnklisnfikqqm |
| | | pkglfdrrlymledlateknkilskplifprgifddkptfkkgvqvseepeafadwys |
| | | ygydvkhkfqefyawdrdyeellreelekdtaftknsihysresqiellakkqdlkvk |
| | | kvriqdlylklmaeflfenvfghelalpldqfyltqeerlkqeqeaivqsqrpkgdds |
| | | pnivkenfiwsktipfksgrvfepnvklkdigkfrnlltdekvdillsynnteigkqvi |
| | | eneliigagsyefirreqlfkeiqqmkrlslrsvrgmgvpirinlk |
| Prevotella | WP_0043 | mqkqdklfvdrkknaifafpkyitimenqekpepiyyeltdkhfwaaflnlarhnv |
| buccae | 43581 | yttinhinrrleiaelkddgymmdikgswneqakkldkkvrlrdlimkhfpfleaaa |
| (SEQ ID No. 107) | | yeitnskspnnkeqrekeqsealslnnlknvlfifleklqvlrnyyshykyseespkp |
| | | ifetsllknmykvfdanvrlvkrdymhhenidmqrdfthlnrkkqvgrtkniidsp |
| | | nfhyhfadkegnmtiagllffvslfldkkdaiwmqkklkgfkdgrnlreqmtnevf |
| | | crsrislpklklenvqtkdwmqldmlnelvrcpkslyerlrekdresfkvpfdifsdd |
| | | ydaeeepfkntivrhqdrfpyfvlryfdlneifeqlrfqidlgtyhfsiynkrigdedev |
| | | rhlthhlygfariqdfaqqnqpevwrklvkdldyfeasqepyipktaphyhleneki |
| | | gikfcsthnnlfpslktektcngrskfnlgtqftaeaflsvhellpmmfyyllltkdysr |
| | | kesadkvegiirkeisniyaiydafangeinsiadltcrlqktnilqghlpkqmisileg |
| | | rqkdmekeaerkigemiddtqrrldllckqtnqkirigkrnagllksgkiadwlvnd |
| | | mmrfqpvqkdqnnipinnskansteyrmlqralalfgsenfrlkayfnqmnlvgn |
| | | dnphpflaetqwehqtnilsfyrnylearkkylkglkpqnwkqyqhflilkvqktnr |
| | | ntlvtgwknsfnlprgiftqpirewfekhnnskriydqilsfdrvgfvakaiplyfaee |
| | | ykdnvqpfydypfnignklkpqkgqfldkkervelwqknkelfknypsekkktdl |
| | | ayldflswkkferelrliknqdivtwlmfkelfnmatveglkigeihlrdidtntanee |
| | | snnilnrimpmklpvktyetdnkgnilkerplatfyieetetkvlkqgnfkvlakdrrl |
| | | ngllsfaettdidleknpitklsvdhelikyqttrisifemtlglekklinkyptlptdsfrn |
| | | mlerwlqckanrpelknyvnsliavrnafshnqypmydatlfaevkkftlfpsvdtk |
| | | kielniapqlleivgkaikeieksenkn |
| Porphyromonas | WP_0058 | mntvpasenkgqsrtveddpqyfglylnlarenlieveshvrikfgkkklneeslkq |
| gingivalis | 73511 | sllcdhllsvdrwtkvyghsrrylpflhyfdpdsqiekdhdsktgvdpdsaqrlirely |
| (SEQ ID No. 108) | | slldflrndfshnrldgttfehlevspdissfitgtyslacgraqsrfadffkpddfvlakn |
| | | rkeqlisvadgkecltvsglafficlfldreqasgmlsrirgfkrtdenwaravhetfcd |
| | | lcirhphdrlessntkeallldmlnelnrcprilydmlpeeeraqflpaldensmnnls |
| | | enslneesrllwdgssdwaealtkrirhqdrfpylmlrfieemdllkgirfrvdlgeiel |
| | | dsyskkvgrngeydrtitdhalafgklsdfqneeevsrmisgeasypvrfslfaprya |
| | | iydnkigychtsdpvypksktgekralsnpqsmgfisvhnlrklllmellcegsfsr |
| | | mqsdflrkanrildetaegklqfsalfpemrhrfippqnpkskdrrekaettlekykq |
| | | eikgrkdklnsqllsafdmnqrqlpsrlldewmnirpashsvklrtyvkqlnedcrlr |
| | | lrkfrkdgdgkaraiplvgematflsqdivrmiiseetkklitsayynemqrslaqya |
| | | geenrrqfraivaelhlldpssghpflsatmetahrytedfykcylekkrewlaktfyr |
| | | peqdentkrrisvffvpdgearkllpllirrrmkeqndlqdwirnkqahpidlpshlf |
| | | dskimellkykdgkkkwneafkdwwstkypdgmqpfyglrrelnihgksysyi |
| | | psdgkkfadcythlmektvqdkkrelrtagkpvppdlaadikrsfhravnerefmlr |
| | | lvqeddrlmlmainkmmtdreedilpglknidsildeenqfslavhakvlekegeg |
| | | gdnslslvpatieikskrkdwskyiryrydrrvpglmshfpehkatldevktllgeyd |
| | | rcrikifdwafalegaimsdrdlkpylhesssregksgehstivkmlvekkgcltpde |
| | | sqylilirnkaahnqfpcaaempliyrdvsakvgsiegssakdlpegsslvdslwkk |
| | | yemiirkilpildpenrffgkllnnmsqpindl |
| Porphyromonas | WP_0058 | mteqnekpyngtyytledkhfwaaffnlarhnayitlahidrqlayskaditndedil |
| gingivalis | 74195 | ffkgqwknldndlerkarlrslilkhfsflegaaygkklfesqssgnksskkkeltkke |
| (SEQ ID No. 109) | | keelqanalsldnlksilfdflqklkdfrnyyshyrhpesselplfdgnmlqrlynvfd |
| | | vsvqrvkrdhehndkvdphrhfnhlvrkgkkdkygnndnpffkhhfvdreekvt |
| | | eagllffvslflekrdaiwmqkkirgfkggteayqqmtnevfcrsrislpklkleslrtd |
| | | dwmlldmlnelvrcpkslydrlreedrarfrvpvdilsdeddtdgteedpfkntivrh |
| | | qdrfpyfalryfdlkkvftslrfhidlgtyhfaiykknigeqpedrhltrnlygfgriqdf |
| | | aeehrpeewkrlyrdldyfetgdkpyitqttphyhiekgkiglrfvpegqllwpspe |
| | | vgatrtgrskyaqdkrftaeaflsvhelmpmmfyyfllrekyseeasaekvqgrikr |
| | | viedvyavydafardeintrdeldacladkgirrghlprqmiailsqehkdmeekvr |
| | | kklqemiadtdhrldmldrqtdrkirigrknaglpksgviadwlvrdmmrfqpva |
| | | kdtsgkpinnskansteyrmlqralalfggekerltpyfrqmnitggnnphpflhetr |
| | | weshtnilsfyrsylkarkaflqsigrsdreenhrflllkepktdrqtivagwksefhlp |
| | | rgifteavrdcliemgydevgsykevgfmakavplyferackdrvqpfydypfnv |
| | | gnslkpkkgrflskekraeewesgkerfrdleawshsaarriedafvgieyaswenk |
| | | kkieqllqdlslwetfesklkvkadkiniaklkkeileakehpyhdfkswqkferelrl |
| | | vknqdiitwmmcrdlmeenkvegldtgtlylkdirtdvqeqgslnylnhvkpmrl |
| | | pvvvyradsrghvhkeeaplatvyieerdtkllkqgnfksfvkdrringlfsfvdtgal |
| | | ameqypisklrveyelakyqtarvcafeqtleleeslltryphlpdesfremleswsd |
| | | plldkwpdlqrevrlliavrnafshnqypmydetifssirkydpssldaieermglni |
| | | ahrlseevklakemveriiqa |
| Prevotella | WP_0060 | mkeeekgktpvvstynkddkhfwaaflnlarhnvyitvnhinkilgegeinrdgye |
| pallens | 44833 | ntlekswneikdinkkdrlskliikhfpflevttyqrnsadttkqkeekqaeaqslesl |
| (SEQ ID No. 110) | | kksffvfiyklrdlrnhyshykhskslerpkfeedlqekmynifdasiqlvkedykh |
| | | ntdikteedfkhldrkgqfkysfadnegnitesgllffvslflekkdaiwvqkklegfk |
| | | csnesyqkmtnevfcrsrmllpklrlqstqtqdwilldmlnelircpkslyerlreedr |
| | | kkfrvpieiadedydaeqepfknalvrhqdrfpyfalryfdyneiftnlrfqidlgtyh |
| | | fsiykkqigdykeshhlthklygferiqeftkqnrpdewrkfvktfnsfetskepyip |
| | | ettphyhlenqkigirfrndndkiwpslktnseknekskykldksfqaeaflsvhell |
| | | pmmfyylllktentdndneietkkkenkndkqekhkieeiienkiteiyalydafan |
| | | gkinsidkleeyckgkdieighlpkqmiailksehkdmateakrkqeemladvqk |
| | | slesldnqineeienverknsslksgeiaswlvndmmrfqpvqkdnegnpinnsk |
| | | ansteyqmlqrslalynkeekptryfrqvnliessnphpflnntewekcnnilsfyrs |
| | | yleakknfleslkpedweknqyflmlkepktncetivqgwkngfnlprgiftepirk |
| | | wfmehrknitvaelkrvglvakviplffseeykdsvqpfynylfnvgninkpdekn |
| | | flnceerrellrkkkdefkkmtdkekeenpsylefqswnkferelrlyrnqdivtwll |
| | | cmelfnkkkikelnvekiylknintnttkkeknteekngeekiikeknnilnrimp |
| | | mrlpikvygrenfsknkkkkirrntfftvyieekgtkllkqgnfkalerdrrlgglfsfv |
| | | kthskaesksntisksrveyelgeyqkarieiikdmlaleetlidkynsldtdnfhnml |
| | | tgwlklkdepdkasfqndvdlliavrnafshnqypmrnriafaninpfslssantsee |
| | | kglgianqlkdkthktiekiieiekpietke |
| Myroides | WP_0062 | mkdilttdttekqnrfyshkiadkyffggyfnlasnniyevfeevnkrntfgklakrd |
| odoratimimus | 61414 | ngnlknyiihvfkdelsisdfekrvaifasyfpiletvdkksikernrtidltlsqrirqfr |
| (SEQ ID No. 111) | | emlislvtavdqlrnfythyhhseivienkvldflnsslvstalhvkdkylktdktkefl |
| | | ketiaaeldilieaykkkqiekkntrfkankredilnaiyneafwsfindkdkdketv |
| | | vakgadayfeknhhksndpdfalnisekgivyllsffltnkemdslkanitgfkgkv |
| | | dresgnsikymatqriysfhtyrglkqkirtseegvketllmqmidelskvpnvvyq |
| | | hlsttqqnsfiedwneyykdyeddvetddlsrvihpvirkryedrfnyfairfldeffd |
| | | fptlrfqvhlgdyvhdrrtkqlgkvesdriikekvtvfarlkdinsakanyfhsleeqd |
| | | keeldnkwtlfpnpsydfpkehtlqhqgeqknagkigiyvklrdtqykekaaleea |
| | | rkslnpkersatkaskydiitqiieandnyksekplvftgqpiaylsmndihsmlfsll |
| | | tdnaelkktpeeveaklidqigkqineilskdtdtkilkkykdndlketdtdkitrdlar |
| | | dkeeieklileqkqraddynytsstkfnidksrkrkhllfnaekgkigvwlandikrf |
| | | mteefkskwkgyqhtelqklfayydtsksdldlilsdmvmvkdypielialvkksrt |
| | | lvdflnkylearlgymenvitrvknsigtpqfktvrkecftflkksnytvvsldkqver |
| | | ilsmplfiergfmddkptmlegksyqqhkekfadwfvhykensnyqnfydtevy |
| | | eittedkrekakvtkkikqqqkndvftlmmvnymleevlklssndrlslnelyqtke |
| | | erivnkqvakdtgernknyiwnkvvdlqlceglvridkvklkdignfrkyendsrv |
| | | kefltyqsdivwsaylsnevdsnklyvierqldnyesirskellkevqeiecsvynqv |
| | | ankeslkqsgnenfkqyvlqglvpigmdvremlilstdvkfikeeiiqlgqageveq |
| | | dlysliyirnkfahnqlpikeffdfcennyrsisdneyyaeyymeifrsikekyts |
| Myroides | WP_0062 | mkdilttdttekqnrfyshkiadkyffggyfnlasnniyevfeevnkrntfgklakrd |
| odoratimimus | 65509 | ngnlknyiihvfkdelsisdfekrvaifasyfpiletvdkksikernrtidltlsqrirqfr |
| (SEQ ID No. 112) | | emlislvtavdqlrnfythyhhseivienkvldflnsslvstalhvkdkylktdktkefl |
| | | ketiaaeldilieaykkkqiekkntrfkankredilnaiyneafwsfindkdkdketv |
| | | vakgadayfeknhhksndpdfalnisekgivyllsffltnkemdslkanitgfkgkv |
| | | dresgnsikymatqriysfhtyrglkqkirtseegvketllmqmidelskvpnvvyq |
| | | hlsttqqnsfiedwneyykdyeddvetddlsrvihpvirkryedrfnyfairfldeffd |
| | | fptlrfqvhlgdyvhdrrtkqlgkvesdriikekvtvfarlkdinsakasyfhsleeqd |
| | | keeldnkwtlfpnpsydfpkehtlqhqgeqknagkigiyvklrdtqykekaaleea |
| | | rkslnpkersatkaskydlitqlieandnvksekplvftgqpiaylsmndihsmlfsll |
| | | tdnaelkktpeeveaklidqigkqineilskdtdtkilkkykdndlketdtdkitrdlar |
| | | dkeeieklileqkqraddynytsstkfnidksrkrkhllfnaekgkigvwlandikrf |
| | | mfkeskskwkgyqhtelqklfayfdtsksdlelilsdmvmvkdypielidlvrksrt |
| | | lvdflnkylearlgyienvitrvknsigtpqfktvrkecfaflkesnytvasldkqieril |
| | | smplfiergfmdskptmlegksyqqhkedfadwfvhykensnyqnfydtevyei |
| | | itedkreqakvtkkikqqqkndvftlmmvnymleevlklpsndrlslnelyqtkee |
| | | rivnkqvakdtgernknyiwnkvvdlqlceglvridkvklkdignfrkyendsrvk |
| | | efltyqsdivwsgylsnevdsnklyvierqldnyesirskellkevqeiecivynqva |
| | | nkeslkqsgnenfkqyvlqgllprgtdvremlilstdvkfkkeeimqlgqvreveqd |
| | | lysliyirnkfahnqlpikeffdfcennyrpisdneyyaeyymeifrsikekyas |
| Prevotella | WP_0074 | mqkqdklfvdrkknaifafpkyitimenqekpepiyyeltdkhfwaaflnlarhnv |
| sp. MSX73 | 12163 | yttinhinrrleiaelkddgymmgikgswneqakkldkkvrlrdlimkhfpfleaaa |
| (SEQ ID No. 113) | | yeitnskspnnkeqrekeqsealslnnlknvlfifleklqvlrnyyshykyseespkp |
| | | ifetsllknmykvfdanvrlykrdymhhenidmqrdfthlnrkkqvgrtkniidsp |
| | | nfhyhfadkegnmtiagllffvslfldkkdaiwmqkklkgfkdgrnlreqmtnevf |
| | | crsrislpklklenvqtkdwmqldmlnelvrcpkslyerlrekdresfkvpfdifsdd |
| | | ydaeeepfkntivrhqdrfpyfvlryfdlneifeqlrfqidlgtyhfsiynkrigdedev |
| | | rhlthhlygfariqdfapqnqpeewrklvkdldhfetsqepyisktaphyhlenekig |
| | | ikfcsthnnlfpslkrektcngrskfnlgtqftaeaflsvhellpmmfyyllltkdysrk |
| | | esadkvegiirkeisniyaiydafanneinsiadltcrlqktnilqghlpkqmisilegr |
| | | qkdmekeaerkigemiddtqrrldllckqtnqkirigkrnagllksgkiadwlvsd |
| | | mmrfqpvqkdtnnapinnskansteyrmlqhalalfgsessrlkayfrqmnlvgn |
| | | anphpflaetqwehqtnilsfyrnylearkkylkglkpqnwkqyqhflilkvqktnr |
| | | ntivtgwknsfnlprgiftqpirewfekhnnskriydqilsfdrvgfvakaiplyfaee |
| | | ykdnvqpfydypfnignklkpqkgqfldkkervelwqknkelfknypseknktdl |
| | | ayldflswkkferelrliknqdivtwlmfkelflattveglkigeihlrdidtntanees |
| | | nnilnrimpmklpvktyetdnkgnilkerplatfyieetetkvlkqgnfkvlakdrrl |
| | | ngllsfaettdidleknpitklsvdyelikyqttrisifemtlglekklidkystlptdsfrn |
| | | mlerwlqckanrpelknyvnsliavrnafshnqypmydatlfaevkkftlfpsvdtk |
| | | kielniapqlleivgkaikeieksenkn |
| Porphyromonas | WP_0124 | mteqnerpyngtyytledkhfwaaffnlarhnayitlahidrqlayskaditndedilf |
| gingivalis | 58414 | fkgqwknldndlerkarlrslilkhfsflegaaygkklfesqssgnksskkkeltkke |
| (SEQ ID No. 114) | | keelqanalsldnlksilfdflqklkdfrnyyshyrhpesselplfdgnmlqrlynvfd |
| | | vsvqrvkrdhehndkvdphrhfnhlvrkgkkdrygnndnpffkhhfvdreekvte |
| | | agllffvslflekrdaiwmqkkirgfkggtetyqqmtnevfcrsrislpklkleslrtdd |
| | | wmlldmlnelvrcpkslydrlreedrarfrvpvdilsdeddtdgteedpfkntlvrhq |
| | | drfpyfalryfdlkkvftslrfhidlgtyhfaiykknigeqpedrhltrnlygfgriqdfa |
| | | eehrpeewkrlyrdldyfetgdkpyitqttphyhiekgkiglrfvpegqhlwpspev |
| | | gatrtgrskyaqdkrltaeaflsvhelmpmmfyyfllrekysdeasaervqgrikrvi |
| | | edvyavydafargeintrdeldacladkgirrghlprqmigilsqehkdmeekvrk |
| | | klqemivdtdhrldmldrqtdrkirigrknaglpksgviadwlvrdmmrfqpvak |
| | | dtsgkpinnskansteyrmlqralalfggekerltpyfrqmnltggnnphpflhetrw |
| | | eshtnilsfyrsylkarkaflqsigrsdrvenhrflllkepktdrqtlvagwkgefhlprg |
| | | ifteavrdcliemgldevgsykevgfmakavplyferackdrvqpfydypfnvgns |
| | | lkpkkgrflskekraeewesgkerfrlaklkkeileakehpyldfkswqkferelrlv |
| | | knqdiitwmicrdlmeenkvegldtgtlylkdirtdvqeqgnlnylnrvkpmrlpv |
| | | vvyradsrghvhkeqaplatvyieerdtkllkqgnfksfvkdrringlfsfvdtgala |
| | | meqypisklrveyelakyqtarvcafeqtleleeslltryphlpdknfrkmleswsdp |
| | | lldkwpdlhgnvrlliavrnafshnqypmydeavfssirkydpsspdaieermgln |
| | | iahrlseevkqakemaeriiqa |
| Paludibacter | WP_0134 | mktsanniyfnginsfkkifdskgaiapiaekscrnfdikaqndvnkeqrihyfavg |
| propionicigenes | 46107 | htfkqldtenlfeyvldenlrakrptrfislqqfdkefienikrlisdirninshyihrfdpl |
| (SEQ ID No. 115) | | kidavptniidflkesfelaviqiylkekginylqfsenphadqklvaflhdkflplde |
| | | kktsmlqnetpqlkeykeyrkyflalskqaaidqllfaeketdyiwnlfdshpvltisa |
| | | gkylsfysclfllsmflykseanqliskikgfkkntteeekskreiftffskrfnsmdid |
| | | seenqlvkfrdlilylnhypvawnkdleldssnpamtdklkskiieleinrsfplyeg |
| | | nerfatfakyqiwgkkhlgksiekeyinasftdeeitaytyetdtcpelkdahkkladl |
| | | kaakglfgkrkeknesdikktetsirelqhepnpikdkliqrieknlltvsygrnqdrf |
| | | mdfsarflaeinyfgqdasfkmyhfyatdeqnselekyelpkdkkkydslkfhqg |
| | | klvhfisykehlkryeswddafviennaiqlklsfdgventvtiqralliylledalrni |
| | | qnntaenagkqllqeyyshnkadlsafkqiltqqdsiepqqktefkkllprrllnnysp |
| | | ainhlqtphsslplilekallaekrycslvvkakaegnyddfikrnkgkqfklqfirka |
| | | wnlmyfrnsylqnvqaaghhksfhierdefndfsrymfafeelsqykyylnemfe |
| | | kkgffennefkilfqsgtslenlyektkqkfeiwlasntaktnkpdnyhlnnyeqqfs |
| | | nqlffinlshfinylkstgklqtdangqiiyealnnvqylipeyyytdkpersesksgn |
| | | klynklkatkledallyemamcylkadkqiadkakhpitklltsdvefnitnkegiql |
| | | yhllvpfkkidafiglkmhkeqqdkkhptsflanivnylelvkndkdirktyeafstn |
| | | pvkrtltyddlakidghlisksikftnvtleleryfifkeslivkkgnnidfkyikglrny |
| | | ynnekkknegirnkafhfgipdsksydqlirdaevmfianevkpthatkytdlnkql |
| | | htvcdklmetvhndyfskegdgkkkreaagqkyfeniisak |
| Porphyromonas | WP_0138 | mteqnekpyngtyytledkhfwaaffnlarhnayitlahidrqlayskaditndedil |
| gingivalis | 16155 | ffkgqwknldndlerkarlrslilkhfsflegaaygkklfesqssgnkssknkeltkke |
| (SEQ ID No. 116) | | keelqanalsldnlksilfdflqklkdfrnyyshyrhpesselplfdgnmlqrlynvfd |
| | | vsvqrvkrdhehndkvdphrhfnhlvrkgkkdrygnndnpffkhhfvdregtvte |
| | | agllffvslflekrdaiwmqkkirgfkggtetyqqmtnevfcrsrislpklkleslrtdd |
| | | wmlldmlnelvrcpkslydrlreedrarfrvpvdilsdeedtdgaeedpfkntivrhq |
| | | drfpyfalryfdlkkvftslrfqidlgtyhfaiykknigeqpedrhltrnlygfgriqdfa |
| | | eehrpeewkrlyrdldyfetgdkpyitqttphyhiekgkiglrfvpegqhlwpspev |
| | | gatrtgrskyaqdkrftaeaflsahelmpmmfyyfllrekyseeasaervqgrikrvi |
| | | edvyavydafardeintrdeldacladkgirrghlprqmigilsqehkdmeekirkk |
| | | lqemmadtdhrldmldrqtdrkirigrknaglpksgviadwlvrdmmrfqpvak |
| | | dtsgkpinnskansteyrmlqralalfggekerltpyfrqmnitggnnphpflhetrw |
| | | eshtnilsfyrsylkarkaflqsigrsdrvenhrifilkepktdrqtivagwkgefhlprg |
| | | ifteavrdcliemgldevgsykevgfmakavplyferackdwvqpfynypfnvgn |
| | | slkpkkgrflskekraeewesgkerfrlaklkkeileakehpyldfkswqkferelrl |
| | | vknqdiitwmicgdlmeenkvegldtgtlylkdirtdvqeqgslnylnrvkpmrlp |
| | | vvvyradsrghvhkeqaplatvyieerdtkllkqgnfksfvkdrrlnglfsfvdtgala |
| | | meqypisklrveyelakyqtarvcafeqtleleeslltrcphlpdknfrkmleswsdp |
| | | lldkwpdlhrkvrlliavrnafshnqypmydeavfssirkydpsfpdaieermglni |
| | | ahrlseevkqaketveriiqa |
| Flavobacterium | WP_0141 | mssknesynkqktfnhykqedkyffggflnnaddnlrqvgkefktrinfnhnnnel |
| columnare | 65541 | asvfkdyfnkeksvakrehalnllsnyfpvleriqkhtnhnfeqtreifellldtikklrd |
| (SEQ ID No. 117) | | yythhyhkpitinpkiydflddtlldvlitikkkkvkndtsrellkeklrpeltqlknqk |
| | | reelikkgkklleenlenavfnhclrpfleenktddkqnktvslrkyrkskpneetsitl |
| | | tqsglvflmsfflhrkefqvftsglegfkakvntikeeeislnknnivymithwsysy |
| | | ynfkglkhriktdqgvstleqnntthsltntntkealltqivdylskvpneiyetlsekq |
| | | qkefeedineymrenpenedstfssivshkvirkryenkfnyfamrfldeyaelptlr |
| | | fmvnfgdyikdrqkkilesiqfdseriikkeihlfeklslvteykknvylketsnidlsr |
| | | fplfpnpsyvmannnipfyidsrsnnldeylnqkkkaqsqnkkrnitfekynkeqs |
| | | kdaiiamlqkeigvkdlqqrstigllscnelpsmlyevivkdikgaelenkiaqkire |
| | | qyqsirdftldspqkdnipttliktintdssvtfenqpidiprlknaiqkeltltqekllnv |
| | | keheievdnynrnkntykfknqpknkvddkklqrkyvfyrneirqeanwlasdli |
| | | hfmknkslwkgymhnelqsflaffedkkndcialletvfnlkedciltkglknlflkh |
| | | gnfidfykeylklkedflntestflengliglppkilkkelskrfkyifivfqkrqfiikel |
| | | eekknnlyadainlsrgifdekptmipfkkpnpdefaswfvasyqynnyqsfyelt |
| | | pdiverdkkkkyknlrainkvkiqdyylklmvdtlyqdlfnqpldkslsdfyvska |
| | | erekikadakayqkrndsslwnkvihlslqnnritanpklkdigkykralqdekiatl |
| | | ltyddrtwtyalqkpekenendykelhytalnmelqeyekvrskellkqvqelekqi |
| | | leeytdflstqihpadferegnpnfkkylahsileneddldklpekveamreldetitn |
| | | piikkaivliiirnkmahnqyppkfiydlanrfvpkkeeeyfatyfnrvfetitkelwe |
| | | nkekkdktqv |
| Psychroflexus | WP_0150 | mesiiglglsfnpyktadkhyfgsflnlvennlnavfaefkerisykakdenissliek |
| torquis | 24765 | hfidnmsivdyekkisilngylpiidflddelennlntrvknfkknfiilaeaieklrdy |
| (SEQ ID No. 118) | | ythfyhdpitfednkepllelldevllktildvkkkylktdktkeilkdslreemdllvir |
| | | ktdelrekkktnpkiqhtdssqiknsifndafqgllyedkgnnkktqvshraktrinp |
| | | kdihkqeerdfeiplstsglvflmslflskkeiedfksnikgfkgkvvkdenhnslky |
| | | mathrvysilafkglkyriktdtfsketlmmqmidelskvpdcvygnisetkqkdfi |
| | | edwneyfkdneentenlensrvvhpvirkryedkfnyfairfldefanfktlkfqvf |
| | | mgyyihdqrtktigttnittertvkekinvfgklskmdnlkkhffsqlsddentdwef |
| | | fpnpsynfltqadnspannipiylelknqqiikekdaikaevnqtqnrnpnkpskrd |
| | | llnkilktyedfhqgdptailslneipallhlflvkpnnktgqqieniirikiekqfkain |
| | | hpsknnkgipkslfadtnvrvnaiklkkdleaeldmlnkkhiafkenqkassnydk |
| | | llkehqftpknkrpelrkyvfyksekgeeatwlandikrfmpkdfktkwkgcqhse |
| | | lqrklafydrhtkqdikellsgcefdhslldinayfqkdnfedffskylenrietlegylk |
| | | klhdfkneptplkgvfkncfkflkrqnyvtespeiikkrilakpfflprgvfderptmk |
| | | kgknplkdknefaewfveylenkdyqkfynaeeyrmrdadfkknavikkqklkd |
| | | fytlqmvnyllkevfgkdemnlqlselfqtrqerlklqgiakkqmnketgdssentr |
| | | nqtyiwnkdvpvsffngkvtidkvklknigkykryerdervktfigyevdekwm |
| | | mylphnwkdrysvkpinvidlqiqeyeeirshellkeiqnlegyiydhttdknillqd |
| | | gnpnfkmyylnglligikqvnipdfivlkqntnfdkidftgiascselekktiiliairn |
| | | kfahnqlpnkmiydlaneflkieknetyanyylkvlkkmisdla |
| Riemerella | WP_0153 | mffsfhnaqrvifkhlykafdaslrmykedykahftvnitrdfahlnrkgknkqdn |
| anatipestifer | 45620 | pdfnryrfekdgfftesgllfftnlfldkrdaywmlkkvsgfkashkqrekmttevfc |
| (SEQ ID No. 119) | | rsrillpklrlesrydhnqmlldmlselsrcpkllyeklseenkkhfqveadgfldeie |
| | | eeqnpfkdtlirhqdrfpyfalryldlnesfksirfqvdlgtyhyciydkkigdeqekr |
| | | hltrtllsfgrlqdfteinrpqewkaltkdldyketsnqpfiskttphyhitdnkigfrlgt |
| | | skelypsleikdganriakypynsgfvahafisvhellplmfyqhltgksedllketvr |
| | | hiqriykdfeeerintiedlekanqgrlplgafpkqmlgllqnkqpdlsekakikiekl |
| | | iaetkllshrlntklksspklgkrrekliktgvladwlvkdfmrfqpvaydaqnqpik |
| | | sskanstefwfirralalyggeknrlegyfkqtnligntnphpflnkfnwkacrnlvdf |
| | | yqqylegekfleaikhqpwepyqyclllkvpkenrknlvkgweqggislprglfte |
| | | airetlskdltlskpirkeikkhgrvgfisraitlyfkekyqdkhqsfynlsykleakapl |
| | | lkkeehyeywqqnkpqsptesqrlelhtsdrwkdyllykrwqhlekklrlyrnqdi |
| | | mlwlmtleltknhfkelnlnyhqlklenlavnvqeadaklnpinqtlpmvlpvkvy |
| | | pttafgevqyhetpirtvyireeqtkalkmgnfkalvkdrringlfsfikeendtqkhp |
| | | isqlrlrreleiyqslrvdafketlsleekllnkhaslsslenefrtlleewkkkyaassm |
| | | vtdkhiafiasvrnafchnqypfyketlhapillftvaqptteekdglgiaeallkvlre |
| | | yceivksqi |
| Prevotella | WP_0215 | mendkrleesacytlndkhfwaaflnlarhnvyitvnhinktlelknkknqeiiidnd |
| pleuritidis | 84635 | qdilaikthwakvngdlnktdrlrelmikhfpfleaaiysnnkedkeevkeekqaka |
| (SEQ ID No. 120) | | qsfkslkdclflfleklqearnyyshykysesskepefeegllekmyntfdasirlvke |
| | | dyqynkdidpekdfkhlerkedfnylftdkdnkgkitkngllffvslflekkdaiwm |
| | | qqkfrgfkdnrgnkekmthevfcrsrmllpkirlestqtqdwilldmlnelircpksl |
| | | yerlqgayrekfkvpfdsidedydaeqepfrntivrhqdrfpyfalryfdyneifknlr |
| | | fqidlgtyhfsiykkliggkkedrhlthklygferiqeftkqnrpdkwqaiikdldtye |
| | | tsneryisettphyhlenqkigirfrndnndiwpslktngeknekskynldkpyqae |
| | | aflsvhellpmmfyylllkmentdndkednevgtkkkgnknnkqekhkieeiien |
| | | kikdiyalydaftngeinsidelaeqregkdieighlpkqlivilknkskdmaekanr |
| | | kqkemikdtkkrlatldkqvkgeiedggrnirllksgeiarwlvndmmrfqpvqk |
| | | dnegkpinnskansteyqmlqrslalynkeekptryfrqvnlikssnphpfledtkw |
| | | eecynilsfyrnylkakikflnklkpedwkknqyflmlkepktnrktlvqgwkngf |
| | | nlprgiftepikewfkrhqndseeykkvealdrvglvakviplffkeeyfkedaqke |
| | | inncvqpfysfpynvgnihkpeeknflhceerrklwdkkkdkfkgykakekskk |
| | | mtdkekeehrsylefqswnkferelrlvrnqdiltwllctklidklkidelnieelqklrl |
| | | kdidtdtakkeknnilnrvmpmrlpvtvyeidksfnivkdkplhtvyieetgtkllk |
| | | qgnfkalvkdrringlfsfvktsseaeskskpisklrveyelgayqkaridiikdmlal |
| | | ektlidndenlptnkfsdmlkswlkgkgeankarlqndvgllvavrnafshnqyp |
| | | mynsevfkgmkllslssdipekeglgiakqlkdkiketieriieiekeirn |
| Porphyromonas | WP_0216 | mntvpasenkgqsrtveddpqyfglylnlarenlieveshvrikfgkkklneeslkq |
| gingivalis | 63197 | sllcdhllsvdrwtkvyghsrrylpflhyfdpdsqiekdhdsktgvdpdsaqrlirely |
| (SEQ ID No. 121) | | slldflrndfshnrldgttfehlevspdissfitgtyslacgraqsrfadffkpddfvlakn |
| | | rkeqlisvadgkecltvsglafficlfldreqasgmlsrirgfkrtdenwaravhetfcd |
| | | lcirhphdrlessntkeallldmlnelnrcprilydmlpeeeraqflpaldensmnnls |
| | | enslneesrllwdgssdwaealtkrirhqdrfpylmlrfieemdllkgirfrvdlgeiel |
| | | dsyskkvgrngeydrtitdhalafgklsdfqneeevsrmisgeasypvrfslfaprya |
| | | iydnkigychtsdpvypksktgekralsnprsmgfisvhdlrklllmellcegsfsrm |
| | | qsdflrkanrildetaegklqfsalfpemrhrfippqnpkskdrrekaettlekykqei |
| | | kgrkdklnsqllsafdmdqrqlpsrlldewmnirpashsvklrtyvkqlnedcrlrlq |
| | | kfrkdgdgkaraiplvgematflsqdivrmiiseetkklitsayynemqrslaqyag |
| | | eenrhqfraivaelrlldpssghpflsatmetahrytedfykcylekkrewlaktfyrp |
| | | eqdentkrrisvffvpdgearkllpllirrrmkeqndlqdwirnkqahpidlpshlfds |
| | | kimellkvkdgkkkwneafkdwwstkypdgmqpfyglrrelnihgksysyips |
| | | dgkkfadcythlmektvqdkkrelrtagkpvppdlaadikrsfhravnerefmlrlv |
| | | qeddrlmlmainkmmtdreedilpglknidsildeenqfslavhakvlekegegg |
| | | dnslslvpatieikskrkdwskyiryrydrrvpglmshfpehkatldevktllgeydr |
| | | crikifdwafalegaimsdrdlkpylhesssregksgehstivkmlvekkgcltpde |
| | | sqylilirnkaahnqfpcaaempliyrdvsakvgsiegssakdlpegsslvdslwkk |
| | | yemiirkilpildpenrffgkllnnmsqpindl |
| Porphyromonas | WP_0216 | mntvpasenkgqsrtveddpqyfglylnlarenlieveshvrikfgkkklneeslkq |
| gingivalis | 65475 | sllcdhllsvdrwtkvyghsrrylpflhyfdpdsqiekdhdsktgvdpdsaqrlirely |
| (SEQ ID No. 122) | | slldflrndfshnrldgttfehlevspdissfitgtyslacgraqsrfadffkpddfvlakn |
| | | rkeqlisvadgkecltvsglafficlfldreqasgmlsrirgfkrtnenwaravhetfcd |
| | | lcirhphdrlessntkeallldmlnelnrcprilydmlpeeeraqflpaldensmnnls |
| | | enslneesrllwdgssdwaealtkrirhqdrfpylmlrfieemdllkgirfrvdlgeiel |
| | | dsyskkvgrngeydrtitdhalafgklsdfqneeevsrmisgeasypvrfslfaprya |
| | | iydnkigychtsdpvypksktgekralsnpqsmgfisvhdlrklllmellcegsfsr |
| | | mqsgflrkanrildetaegklqfsalfpemrhrfippqnpkskdrrekaettlekykq |
| | | eikgrkdklnsqllsafdmnqrqlpsrlldewmnirpashsvklrtyvkqlnedcrlr |
| | | lrkfrkdgdgkaraiplvgematflsqdivrmiiseetkklitsayynemqrslaqya |
| | | geenrrqfraivaelhlldpssghpflsatmetahrytedfykcylekkrewlaktfyr |
| | | peqdentkrrisvffvpdgearkllpllirrrmkeqndlqdwirnkqahpidlpshlf |
| | | dskimellkvkdgkkkwneafkdwwstkypdgmqpfyglrrelnihgksysyi |
| | | psdgkkfadcythlmektvqdkkrelrtagkpvppdlaadikrsfhravnerefmlr |
| | | lvqeddrlmlmainkmmtdreedilpglknidsildkenqfslavhakvlekegeg |
| | | gdnslslvpatieikskrkdwskyiryrydrrvpglmshfpehkatldevktllgeyd |
| | | rcrikifdwafalegaimsdrdlkpylhesssregksgehstivkmlvekkgcltpde |
| | | sqylilirnkaahnqfpcaaempliyrdvsakvgsiegssakdlpegsslvdslwkk |
| | | yemiirkilpildhenrffgkllnnmsqpindl |
| Porphyromonas | WP_0216 | mntvpasenkgqsrtveddpqyfglylnlarenlieveshvrikfgkkklneeslkq |
| gingivalis | 77657 | sllcdhllsvdrwtkvyghsrrylpflhyfdpdsqiekdhdsktgvdpdsaqrlirely |
| (SEQ ID No. 123) | | slldflrndfshnrldgttfehlevspdissfitgtyslacgraqsrfadffkpddfvlakn |
| | | rkeqlisvadgkecltvsglafficlfldreqasgmlsrirgfkrtdenwaravhetfcd |
| | | lcirhphdrlessntkeallldmlnelnrcprilydmlpeeeraqflpaldensmnnls |
| | | enslneesrllwdgssdwaealtkrirhqdrfpylmlrfieemdllkgirfrvdlgeiel |
| | | dsyskkvgrngeydrtitdhalafgklsdfqneeevsrmisgeasypvrfslfaprya |
| | | iydnkigychtsdpvypksktgekralsnpqsmgfisvhdlrklllmellcegsfsr |
| | | mqsgflrkanrildetaegklqfsalfpemrhrfippqnpkskdrrekaettlekykq |
| | | eikgrkdklnsqllsafdmnqrqlpsrlldewmnirpashsvklrtyvkqlnedcrlr |
| | | lrkfrkdgdgkaraiplvgematflsqdivrmiiseetkklitsayynemqrslaqya |
| | | geenrrqfraivaelhlldpssghpflsatmetahrytedfykcylekkrewlaktfyr |
| | | peqdentkrrisvffvpdgearkllpllirrrmkeqndlqdwirnkqahpidlpshlf |
| | | dskimellkykdgkkkwneafkdwwstkypdgmqpfyglrrelnihgksysyi |
| | | psdgkkfadcythlmektvqdkkrelrtagkpvppdlaadikrsfhravnerefmlr |
| | | lvqeddrlmlmainkmmtdreedilpglknidsildeenqfslavhakvlekegeg |
| | | gdnslslvpatieikskrkdwskyiryrydrrvpglmshfpehkatldevktllgeyd |
| | | rcrikifdwafalegaimsdrdlkpylhesssregksgehstivkmlvekkgcltpde |
| | | sqylilirnkaahnqfpcaaempliyrdvsakvgsiegssakdlpegsslvdslwkk |
| | | yemiirkilpildhenrffgkllnnmsqpindl |
| Porphyromonas | WP_0216 | mntvpasenkgqsrtveddpqyfglylnlarenlieveshvrikfgkkklneeslkq |
| gingivalis | 80012 | sllcdhllsvdrwtkvyghsrrylpflhyfdpdsqiekdhdsktgvdpdsaqrlirely |
| (SEQ ID No. 124) | | slldflrndfshnrldgttfehlevspdissfitgtyslacgraqsrfadffkpddfvlakn |
| | | rkeqlisvadgkecltvsglafficlfldreqasgmlsrirgfkrtdenwaravhetfcd |
| | | lcirhphdrlessntkeallldmlnelnrcprilydmlpeeeraqflpaldensmnnls |
| | | enslneesrllwdgssdwaealtkrirhqdrfpylmlrfieemdllkgirfrvdlgeiel |
| | | dsyskkvgrngeydrtitdhalafgklsdfqneeevsrmisgeasypvrfslfaprya |
| | | iydnkigychtsdpvypksktgekralsnprsmgfisvhdlrklllmellcegsfsrm |
| | | qsdflrkanrildetaegklqfalfpemrhrfippqnpkskdrrekaettlekyqei |
| | | kgrkdklnsqllsafdmdqrqlpsrlldewnirpashsvklrtyvkqlnedcrlrlq |
| | | kfrkdgdgkaraiplvgematflsqdivrmiiseetkklitsayynemqrslaqyag |
| | | eenrhqfraivaelrlldpssghpflsatmetahrytedfykcylekkrewlaktfyrp |
| | | eqdentkrrisvffvpdgearkllpllirrrmkeqndlqdwirnkqahpidlpshlfds |
| | | kvmellkykdgkkkwneafkdwwstkypdgmqpfyglrrelnihgksysyips |
| | | dgkkfadcythlmektvrdkkrelrtagkpvppdlaayikrsfhravnerefmlrlv |
| | | qeddrlmlmainkimtdreedilpglknidsildkenqfslavhakvlekegeggd |
| | | nslslvpatieikskrkdwskyiryrydrrvpglmshfpehkatldevktllgeydrcr |
| | | ikifdwafalegaimsdrdlkpylhesssregksgehstivkmlvekkgcltpdesq |
| | | ylilirnkaahnqfpcaaeipliyrdvsakvgsiegssakdlpegsslvdslwkkye |
| | | miirkilpildpenrffgkllnnmsqpindl |
| Porphyromonas | WP_0238 | mntvpasenkgqsrtveddpqyfglylnlarenlieveshvrikfgkkklneeslkq |
| gingivalis | 46767 | sllcdhllsvdrwtkvyghsrrylpflhyfdpdsqiekdhdsktgvdpdsaqrlirely |
| (SEQ ID No. 125) | | slldflrndfshnrldgttfehlevspdissfitgtyslacgraqsrfadffkpddfvlakn |
| | | rkeqlisvadgkecltvsglafficlfldreqasgmlsrirgfkrtdenwaravhetfcd |
| | | lcirhphdrlessntkeallldmlnelnrcprilydmlpeeeraqflpaldensmnnls |
| | | enslneesrllwdgssdwaealtkfirhqdrfpylmlrfieemdllkgirfrvdlgeiel |
| | | dsyskkvgrngeydrtitdhalafgklsdfqneeevsrmisgeasypvrfslfaprya |
| | | iydnkigychtsdpvypksktgekralsnprsmgfisvhdlrklllmellcegsfsrm |
| | | qsdflrkanfildetaegklqfsalfpemrhrfippqnpkskdrrekaettlekykqei |
| | | kgrkdklnsqllsafdmnqrqlpsrlldewmnirpashsvklrtyvkqlnedcrlrlr |
| | | kfrkdgdgkaraiplvgematflsqdivrmiiseetkklitsayynemqrslaqyag |
| | | eenrrqfraivaelhlldpssghpflsatmetahrytedfykcylekkrewlaktfyrp |
| | | eqdentkrrisvffvpdgearkllpllirrrmkeqndlqdwirnkqahpidlpshlfds |
| | | kimellkykdgkkkwneafkdwwstkypdgmqpfyglrrelnihgksvsyips |
| | | dgkkfadcythlmektvqdkkrelrtagkpvppdlaadikrsfhravnerefmlrlv |
| | | qeddrlmlmainkmmtdreedilpglknidsildeenqfslavhakvlekegegg |
| | | dnslslvpatieikskrkdwskyiryrydrrvpglmshfpehkatldevktllgeydr |
| | | crikifdwafalegaimsdrdlkpylhesssregksgehstlvkmlvekkgcltpde |
| | | sqylilirnkaahnqfpcaaempliyrdvsakvgsiegssakdlpegsslvdslwkk |
| | | yemiirkilpildpenrffgkllnnmsqpindl |
| Prevotella | WP_0368 | mkndnnstkstdytlgdkhfwaaflnlarhnvyitvnhinkvl |
| falsenii | 84929 | dqdilaiktlwgkvdtdinkkdrlrelimkhfpfleaatyqqsstnntkqkeeeqaka |
| (SEQ ID No. 126) | | qsfeslkdclflfleklrearnyyshykhsksleepkleekllenmynifdtnvqlvik |
| | | dyehnkdinpeedfkhlgraegefnyyftrnkkgnitesgllffvslflekkdaiwaq |
| | | tkikgfkdnrenkqkmthevfcrsrmllpklrlestqtqdwilldmlnelircpksly |
| | | krlqgekrekfrvpfdpadedydaeqepfkntivrhqdrfpyfalryfdyneiftnlrf |
| | | qidlgtyhfsiykkqigdkkedrhlthklygferiqefakenrpdewkalvkdldtfe |
| | | esnepyisettphyhlenqkigirnknkkkkktiwpsletkttvnerskynlgksfka |
| | | eaflsvhellpmmfyylllnkeepnngkinaskvegiiekkirdiyklygafaneei |
| | | nneeelkeycegkdiairhlpkqmiailkneykdmakkaedkqkkmikdtkkrla |
| | | aldkqvkgevedggrnikplksgriaswlvndmmrfqpvqrdrdgypinnskan |
| | | steyqllqrtlalfgsererlapyfrqmnligkdnphpflkdtkwkehnnilsfyrsyle |
| | | akknflgslkpedwkknqyflklkepktnretivqgwkngfnlprgiftepirewfir |
| | | hqneseeykkvkdfdriglvakviplffkedyqkeiedyvqpfygypfnvgnihns |
| | | qegtflnkkereelwkgnktkfkdyktkeknkektnkdkfkkktdeekeefrsyld |
| | | fqswkkferelrlyrnqdivtwllcmelidklkidelnieelqklrlkdidtdtakkek |
| | | nnilnrimpmelpvtvyetddsnniikdkplhtiyikeaetkllkqgnfkalvkdrrl |
| | | nglfsfvetsseaelkskpiskslveyelgeyqrarveiikdmlrleetligndeklptn |
| | | kfrqmldkwlehkketddtdlkndvklltevrnafshnqypmrdriafanikpfsls |
| | | santsneeglgiakklkdktketidriieieeqtatkr |
| Prevotella | WP_0369 | mendkrleestcytlndkhfwaaflnlarhnvyitinhinklleirqidndekvldika |
| pleuritidis | 31485 | lwqkvdkdinqkarlrelmikhfpfleaaiysnnkedkeevkeekqakaqsfkslk |
| (SEQ ID No. 127) | | dclflfleklqearnyyshykssesskepefeegllekmyntfgvsirlvkedyqynk |
| | | didpekdfkhlerkedfnylftdkdnkgkitkngllffvslflekkdaiwmqqklrgf |
| | | kdnrgnkekmthevfcrsrmllpkirlestqtqdwilldmlnelircpkslyerlqga |
| | | yrekfkvpfdsidedydaeqepfrntivrhqdrfpyfalryfdyneifknlrfqidlgt |
| | | yhfsiykkligdnkedrhlthklygferiqefakqkrpnewqalvkdldiyetsneq |
| | | yisettphyhlenqkigirfknkkdkiwpsletngkenekskynldksfqaeaflsih |
| | | ellpmmfydlllkkeepnndeknasivegfikkeikrmyaiydafaneeinskegl |
| | | eeycknkgfqerhlpkqmiailtnksknmaekakrkqkemikdtkkrlatldkqv |
| | | kgeiedggrnirllksgeiarwlyndmmrfqsvqkdkegkpinnskansteyqml |
| | | qrslalynkeqkptpyfiqvnlikssnphpfleetkweecnnilsfyrsyleakknfle |
| | | slkpedwkknqyflmlkepktnrktlvqgwkngfnlprgiftepikewfkrhqnd |
| | | seeykkvealdrvglvakviplffkeeyfkedaqkeinncvqpfysfpynvgnihk |
| | | peeknflhceerrklwdkkkdkfkgykakekskkmtdkekeehrsylefqswnk |
| | | ferelrlyrnqdivtwllctelidklkidelnieelqklrlkdidtdtakkeknnilnrim |
| | | pmqlpvtvyeidksfnivkdkplhtiyieetgtkllkqgnfkalvkdrrlnglfsfvkt |
| | | sseaeskskpisklrveyelgayqkaridiikdmlalektlidndenlptnkfsdmlk |
| | | swkgkgeankarlqndvdllvairnafshnqypmynsevfkgmkllslssdipek |
| | | eglgiakqlkdkiketieriieiekeirn |
| [Porphyromonas | WP_0394 | mteqnerpyngtyytledkhfwaaffnlarhnayitlahidrqlayskaditndedilf |
| gingivalis | 17390 | fkgqwknldndlerkarlrslilkhfsflegaaygkklfesqssgnksskkkeltkke |
| (SEQ ID No. 128) | | keelqanalsldnlksilfdflqklkdfrnyyshyrhpesselplfdgnmlqrlynvfd |
| | | vsvqrvkrdhehndkvdphrhfnhlvrkgkkdrygnndnpffkhhfvdregtvte |
| | | agllffvslflekrdaiwmqkkirgfkggteayqqmtnevfcrsrislpklkleslrtd |
| | | dwmlldmlnelvrcpkslydrlreedrarfrvpidilsdeddtdgteedpfkntivrh |
| | | qdrfpyfalryfdlkkvftslrfhidlgtyhfaiykknigeqpedrhltrnlygfgriqdf |
| | | aeehrpeewkrlyrdldyfetgdkpyitqttphyhiekgkiglrfvpegqhlwpspe |
| | | vgatrtgrskyaqdkrltaeaflsvhelmpmmfyyfllrekyseevsaekvqgrikr |
| | | viedvyavydafargeidtldrldacladkgirrghlprqmiailsgehkdmeekvr |
| | | kklqemiadtdhrldmldrqtdrkirigrknaglpksgviadwlvrdmmrfqpva |
| | | kdtsgkpinnskansteyrmlqralalfggekerltpyfrqmnitggnnphpflhetr |
| | | weshtnilsfyrsylkarkaflqsigrsdreenhrflllkepktdrqtivagwksefhlp |
| | | rgifteavrdcliemgydevgsykevgfmakavplyferackdrvqpfydypfnv |
| | | gnslkpkkgrflskekraeewesgkerfrlaklkkeileakehpyldfkswqkferel |
| | | rlvknqdiitwmmerdlmeenkvegldtgtlylkdirtdvheqgslnvinrvkpmr |
| | | lpvvvyradsrghvhkeqaplatvyieerdtkllkqgnfksfvkdrringlfsfvdtga |
| | | lameqypisklrveyelakyqtarvcafeqtleleeslltryphlpdknfrkmlesws |
| | | dplldkwpdlhrkvrlliavrnafshnqypmydeavfssirkydpsspdaieermg |
| | | lniahrlseevkqakemaeriiqv |
| Porphyromonas | WP_0394 | mteqserpyngtyytledkhfwaaflnlarhnayitlthidrqlayskaditndqdvls |
| gulae | 18912 | fkalwknldndlerksrlrslilkhfsflegaaygkklfeskssgnkssknkeltkkek |
| (SEQ ID No. 129) | | eelqanalsldnlksilfdflqklkdfrnyyshyrhsgsselplfdgnmlqrlynvfdv |
| | | svqrvkrdhehndkvdphrhfnhlvrkgkkdryghndnpsfkhhfvdsegmvte |
| | | agllffvslflekrdaiwmqkkirgfkggtetyqqmtnevfcrsrislpklkleslrmd |
| | | dwmlldmlnelvrcpkplydrlreddracfrvpvdilpdeddtdgggedpfkntlv |
| | | rhqdrfpyfalryfdlkkvftslrfhidlgtyhfaiykkmigeqpedrhltrnlygfgri |
| | | qdfaeehrpeewkrlyrdldyfetgdkpyisqtsphyhiekgkiglrfmpegqhlw |
| | | pspevgttrtgrskyaqdkrltaeaflsvhelmpmmfyyfllrekyseevsaekvqg |
| | | rikrviedvyaiydafardeintlkeldacladkgirrghlpkqmiailsqehknmee |
| | | kvrkklqemiadtdhrldmldrqtdrkirigrknaglpksgviadwlvrdmmrfqp |
| | | vakdasgkpinnskansteyrmlqralalfggekerltpyfrqmnitggnnphpflh |
| | | dtrweshtnilsfyrsylrarkaflerigrsdrmenrpflllkepktdrqtlvagwksef |
| | | hlprgifteavrdcliemgydevgsyrevgfmakavplyferacedrvqpfydspf |
| | | nvgnslkpkkgrflskeeraeewergkerfrdleawshsaarriedafagieyaspg |
| | | nkkkieqllrdlslweafesklkvradkinlaklkkeileaqehpyhdfkswqkfere |
| | | lrlyknqdiitwmmerdlmeenkvegldtgtlylkdirtnvqeqgslnvlnhvkp |
| | | mrlpvvvyradsrghvhkeeaplatvyieerdtkllkqgnfksfvkdrrlnglfsfvd |
| | | tgglameqypisklrveyelakyqtarvcafeqtleleeslltryphlpdknfrkmles |
| | | wsdpllakwpelhgkvrlliavrnafshnqypmydeavfssirkydpsspdaieer |
| | | mglniahrlseevkqaketveriiqa |
| Porphyromonas | WP_0394 | mteqserpyngtyytledkhfwaaflnlarhnayitlthidrqlayskaditndqdvls |
| gulae | 19792 | fkalwknldndlerksrlrslilkhfsflegaaygkklfeskssgnkssknkeltkkek |
| (SEQ ID No. 130) | | eelqanalsldnlksilfdflqklkdfrnyyshyrhsgsselplfdgnmlqrlynvfdv |
| | | svqrvkrdhehndkvdphrhfnhlvrkgkkdryghndnpsfkhhfvdgegmvt |
| | | eagllffvslflekrdaiwmqkkirgfkggtetyqqmtnevfcrsrislpklkleslrtd |
| | | dwmlldmlnelvrcpkplydrlrekdrarfrvpvdilpdeddtdgggedpfkntlvr |
| | | hqdrfpyfalryfdlkkvftslrfhidlgtyhfaiykkvigeqpedrhltrnlygfgriq |
| | | dfaeehrpeewkrlyrdldyfetgdkpyisqttphyhiekgkiglrfvpegqhlwps |
| | | pevgttrtgrskyaqdkrltaeaflsvhelmpmmfyyfllrekyseevsaekvqgri |
| | | krviedvyaiydafardeintrdeldacladkgirrghlpkqmigilsqehknmeek |
| | | vrkklqemiadtdhrldmldrqtdrkirigrknaglpksgviadwlvrdmmrfqpv |
| | | akdtsgkpinnskansteyrmlqralalfggekerltpyfrqmnitggnnphpfldet |
| | | rweshtnilsfyrsylrarkaflerigrsdrvenrpflllkepktdrqtivagwksefhlp |
| | | rgifteavrdcliemgydevgsykevgfmakavplyferackdrvqpfydspfnv |
| | | gnslkpkkgrflskekraeewesgkerfrlaklkkeileaqehpyhdfkswqkfere |
| | | lrlvknqdiitwmmerdlmeenkvegldtgtlylkdirpnvqeqgslnvlnrvkp |
| | | mrlpvvvyradsrghvhkeeaplatvyieerdtkllkqgnfksfvkdrringlfsfvd |
| | | tgglameqypisklrveyelakyqtarvcvfeltlrleesllsryphlpdesfremles |
| | | wsdpllakwpelhgkvrlliavrnafshnqypmydeavfssirkydpsspdaieer |
| | | mglniahrlseevkqaketveriiqa |
| Porphyromonas | WP_0394 | mteqserpyngtyytledkhfwaaflnlarhnayitlthidrqlayskaditndqdvls |
| gulae | 26176 | fkalwknfdndlerksrlrslilkhfsflegaaygkklfeskssgnkssknkeltkkek |
| (SEQ ID No. 131) | | eelqanalsldnlksilfdflqklkdfrnyyshyrhsgsselplfdgnmlqrlynvfdv |
| | | svqrvkrdhehndkvdphyhfnhlvrkgkkdryghndnpsfkhhfvdsegmvt |
| | | eagllffvslflekrdaiwmqkkirgfkggtgpyeqmtnevfcrsrislpklkleslrt |
| | | ddwmlldmlnelvrcpkplydrlrekdracfrvpvdilpdeddtdgggedpfkntl |
| | | vrhqdrfpyfalryfdlkkvftslrfhidlgtyhfaiykkmigeqpedrhltrnlygfgr |
| | | iqdfaeehrpeewkrlyrdldyfetgdkpyisqttphyhiekgkiglrfmpegqhlw |
| | | pspevgttrtgrskyaqdkrltaeaflsvhelmpmmfyyfllrekyseevsaekvqg |
| | | rikrvikdvyaiydafardeintlkeldacsadkgirrghlpkqmigilsqehknmee |
| | | kvrkklqemiadtdhrldmldrqtdrkirigrknaglpksgviadwlvrdmmrfqp |
| | | vakdtsgkpinnskansteyrmlqralalfggekerltpyfrqmnitggnnphpfld |
| | | etrweshtnilsfyrsylrarkaflerigrsdrvenrpflllkepkndrqtivagwksefh |
| | | lprgifteavrdcliemgydevgsykevgfmakavplyferackdrvqpfydspfn |
| | | vgnslkpkkgrflskekraeewesgkerfrlaklkkeileakehpyhdfkswqkfer |
| | | elrlvknqdiitwmmerdlmeenkvegldtgtlylkdirtdvheqgslnvinrvkp |
| | | mrlpvvvyradsrghvhkeqaplatvyieerdtkllkqgnfksfvkdrringlfsfvd |
| | | tgglameqypisklrveyelakyqtarvcafeqtleleeslltryphlpdenfremles |
| | | wsdpllgkwpdlhgkvrlliavrnafshnqypmydeavfssirkydpsspdaieer |
| | | mglniahrlseevkqaketveriiqa |
| Porphyromonas | WP_0394 | mteqserpyngtyytledkhfwaaflnlarhnayitlthidrqlayskaditndqdvls |
| gulae | 31778 | fkalwknfdndlerksrlrslilkhfsflegaaygkklfeskssgnkssknkeltkkek |
| (SEQ ID No. 132) | | eelqanalsldnlksilfdflqklkdfrnyyshyrhsesselplfdgnmlqrlynvfdv |
| | | svqrvkrdhehndkvdphrhfnhlvrkgkkdryghndnpsfkhhfvdgegmvt |
| | | eagllffvslflekrdaiwmqkkirgfkggtetyqqmtnevfcrsrislpklkleslrtd |
| | | dwmlldmlnelvrcpkplydrlreddracfrvpvdilpdeddtdgggedpfkntiv |
| | | rhqdrfpyfalryfdlkkvftslrfhidlgtyhfaiykkmigeqpedrhltrnlygfgri |
| | | qdfaeehrpeewkrlyrdldyfetgdkpyisqtsphyhiekgkiglrfmpegqhlw |
| | | pspevgttrtgrskyaqdkrltaeaflsvhelmpmmfyyfllrekyseevsaekvqg |
| | | rikrviedvyaiydafardeintlkeldacladkgirrghlpkqmiailsqehkdmee |
| | | kirkklqemiadtdhrldmldrqtdrkirigrknaglpksgviadwlvrdmmrfqp |
| | | vakdtsgkpinnskansteyrmlqralalfggekkrltpyfrqmnitggnnphpflh |
| | | etrweshtnilsfyrsylrarkaflerigrsdrmenrpflllkepktdrqtivagwksef |
| | | hlprgifteavrdcliemgydevgsyrevgfmakavplyferacedrvqpfydspf |
| | | nvgnslkpkkgrflskeeraeewergkerfrdleawshsaarriedafagieyaspg |
| | | nkkkieqllrdlslweafesklkvradkinlaklkkeileaqehpyhdfkswqkfere |
| | | lrlyknqdiitwmmerdlmeenkvegldtgtlylkdirpnvqeqgslnylnrvkp |
| | | mrlpvvvyradsrghvhkeeaplatvyieerdtkllkqgnfksfvkdrringlfsfvd |
| | | tgglameqypisklrveyelakyqtarvcvfeltlrleeslltryphlpdesfrkmles |
| | | wsdpllakwpelhgkvrlliavrnafshnqypmydeavfssirkydpsspdaieer |
| | | mglniahrlseevkqaketveriiqv |
| Porphyromonas | WP_0394 | mteqserpyngtyytledkhfwaaflnlarhnayitlthidrqlayskaditndedilff |
| gulae | 37199 | kgqwknldndlerksrlrslilkhfsflegaaygkkffeskssgnkssknkeltkkek |
| (SEQ ID No. 133) | | eelqanalsldnlksilfdflqklkdfrnyyshyrhsgsselplfdgnmlqrlynvfdv |
| | | svqrvkrdhehndevdphyhfnhlvrkgkkdryghndnpsfkhhfvdgegmvt |
| | | eagllffvslflekrdaiwmqkkirgfkggtepyeqmtnevfcrsrislpklkleslrtd |
| | | dwmlldmlnelvrcpkplydrlrekdracfrvpvdilpdeddtdgggedpfkntlv |
| | | rhqdrfpyfalryfdlkkvftslrfhidlgtyhfaiykkmigeqpedrhltrnlygfgri |
| | | qdfaeehrpeewkrlyrdldyfetgdkpyisqttphyhiekgkiglrfvpegqhlwp |
| | | spevgttrtgrskyaqdkrltaeaflsvhelmpmmfyyfllrekyseevsaekvqgr |
| | | ikrviedvyaiydafardeintlkeldacladkgirrghlpkqmigilsqehkdmeek |
| | | vrkklqemiadtdhrldmldrqtdrkirigrknaglpksgviadwlvrdmmrfqpv |
| | | akdtsgkplnnskansteyrmlqralalfggekerltpyfrqmnltggnnphpflhet |
| | | rweshtnilsfyrsylrarkaflerigrsdrvencpflllkepktdrqtivagwkgefhl |
| | | prgifteavrdcliemgydevgsyrevgfmakavplyferacedrvqpfydspfnv |
| | | gnslkpkkgrflskekraeewesgkerfrlaklkkeileaqehpyhdfkswqfere |
| | | lrlvknqdiitwmmerdlmeenkvegldtgtlylkdirpnvqeqgslnvlnrvkp |
| | | mrlpvvvyradsrghvhkeeaplatvyieerdtkllkqgnfksfvkdrrlnglfsfvd |
| | | tgalameqypisklrveyelakyqtarvcafeqtleleeslltryphlpdesfremles |
| | | wsdplltkwpelhgkvrlliavrnafshnqypmydeavfssiwkydpsspdaieer |
| | | mglniahrlseevkqaketieriiqv |
| Porphyromonas | WP_0394 | mteqserpyngtyytledkhfwaaflnlarhnayitlthidrqlayskaditndqdvls |
| gulae | 42171 | fkalwknldndlerksrlrslilkhfsflegaaygkklfeskssgnkssknkeltkkek |
| (SEQ ID No. 134) | | eelqanalsldnlksilfdflqklkdfrnyyshyrhsgsselplfdgnmlqrlynvfdv |
| | | svqrvkrdhehndkvdphyhfnhlvrkgkkdryghndnpsfkhhfvdsegmvt |
| | | eagllffvslflekrdaiwmqkkirgfkggtgpyeqmtnevfcrsrislpklkleslrt |
| | | ddwmlldmlnelvrcpkplydrlrekdracfrvpvdilpdeddtdgggedpfkntl |
| | | vrhqdrfpyfalryfdlkkvftslrfhidlgtyhfaiykkmigeqpedrhltrnlygfgr |
| | | iqdfaeehrpeewkrlyrdldyletgdkpyisqttphyhiekgkiglrfvpegqhlw |
| | | pspevgttrtgrskcaqdkrltaeaflsvhelmpmmfyyfllrekyseevsaekvqg |
| | | rikrviedvyaiydafardeintlkeldtcladkgirrghlpkqmitilsqerkdmkek |
| | | irkklqemiadtdhrldmldrqtdrkirigrknaglpksgviadwlvrdmmrfqpv |
| | | akdasgkpinnskansteyrmlqralalfggekerltpyfrqmnitggnnphpflhe |
| | | trweshtnilsfyrsylrarkaflerigrsdrvencpflllkepktdrqtlvagwkdefhl |
| | | prgifteavrdcliemgydevgsyrevgfmakavplyferacedrvqpfydspfnv |
| | | gnslkpkkgrflskedraeewergmerfrdleawshsaarrikdafagieyaspgn |
| | | kkkieqllrdlslweafesklkvradkinlaklkkeileaqehpyhdfkswqkferel |
| | | rlvknqdiitwmmcrdlmeenkvegldtgtlylkdirpnvqeqgslnvlnrvkpm |
| | | rlpvvvyradsrghvhkeaplatvyieerntkllkqgnfksfvkdrrlnglfsfvdtgg |
| | | lameqypisklrveyelakyqtarvcvfeltlrleesllsryphlpdesfremleswsd |
| | | pllakwpelhgkvrlliavrnafshnqypmydeavfssirkydpsspdaieermgl |
| | | niahrlseevkqaketveriiqa |
| Porphyromonas | WP_0394 | mntvpatenkgqsrtveddpqyfglylnlarenlieveshvrikfgkkklneeslkqs |
| gulae | 45055 | llcdhllsidrwtkvyghsrrylpflhcfdpdsgiekdhdsktgvdpdsaqrlirelysl |
| (SEQ ID No. 135) | | ldflrndfshnrldgttfehlkvspdissfitgaytfaceraqsrfadffkpddfllaknrk |
| | | eqlisvadgkecltvsgfafficlfldreqasgmlsrirgfkrtdenwaravhetfcdlci |
| | | rhphdrlessntkeallldmlnelnrcprilydmlpeeeraqflpaldensmnnlsen |
| | | slneesrllwdgssdwaealtkrirhqdrfpylmlrfieemdllkgirfrvdlgeields |
| | | yskkvgrngeydrtitdhalafgklsdfqneeevsrmisgeasypvrfslfapryaiy |
| | | dnkigychtsdpvypksktgekralsnpqsmgfisvhdlrklllmellcegsfsrmq |
| | | sdflrkanrildetaegklqfsalfpemrhrfippqnpkskdrrekaettlekykqeik |
| | | grkdklnsqllsafdmnqrqlpsrlldewmnirpashsvklrtyvkqlnedcrlrlrk |
| | | frkdgdgkaraiplvgematflsqdivrmiiseetkklitsayynemqrslaqyagee |
| | | nrrqfraivaelhlldpssghpflsatmetahrytedfykcylekkrewlaktfyrpeq |
| | | dentkrrisvffvpdgearkllpllirrrmkeqndlqdwirnkqahpidlpshlfdski |
| | | mellkvkdgkkkwneafkdwwstkypdgmqpfyglrrelnihgksvsyipsdg |
| | | kkfadcythlmektvrdkkrelrtagkpvppdlaayikrsfhravnerefmlrlvqe |
| | | ddrlmlmainkmmtdreedilpglknidsildeenqfslavhakvlekegeggdns |
| | | lslvpatieikskrkdwskyiryrydrrvpglmshfpehkatldevktllgeydrcrik |
| | | ifdwafalegaimsdrdlkpylhesssregksgehstivkmlvekkgcltpdesqyl |
| | | ilirnkaahnqfpcaaempliyrdvsakvgsiegssakdlpegsslvdslwkkyem |
| | | iirkilpildhenrffgkllnnmsqpindl |
| Capnocytophaga | WP_0419 | menktslgnniyynpfkpqdksyfagylnaamenidsvfrelgkrlkgkeytsenf |
| cynodegmi | 89581 | fdaifkenislveyeryvkllsdyfpmarlldkkevpikerkenfkknfrgiikavrdl |
| (SEQ ID No. 136) | | rnfythkehgeveitdeifgvldemlkstvltykkkkiktdktkeilklcsiekqldilc |
| | | qkkleylkdtarkieekrrnqrergekklvprfeysdrrddliaaiyndafdvyidkk |
| | | kdslkessktkyntesypqqeegdlkipiskngvvfllslflskqevhafkskiagfka |
| | | tvideatvshrknsicfmatheifshlaykklkrkvrtaeinyseaenaeqlsiyaketl |
| | | mmqmldelskvpdvvygnlsedvqktfiedwneylkenngdvgtmeeeqvih |
| | | pvirkryedkfnyfairfldefaqfptlrfqvhlgnylhdsrpkehlisdrrikekitvfg |
| | | rlselehkkalfikntetnedrkhywevfpnpnydfpkenisvndkdfpiagsildre |
| | | kqptagkigikvnllnqkyisevdkavkahqlkqrnnkpsiqniieeivpingsnpk |
| | | eiivfggqptaylsmndihsilyeffdkwekkkeklekkgekelrkeigkeleekiv |
| | | gkiqtqiqqiidkdinakilkpyqdddstaidkeklikdlkqeqkilqklkneqtarek |
| | | eyqeciayqeesrkikrsdksrqkylrnqlkrkypevptrkeilyyqekgkvavwla |
| | | ndikrfmptdfknewkgeqhsllqkslayyeqckeelknllpqqkvfkhlpfelgg |
| | | hfqqkylyqfytryldialehisglvqqaenfknenkvfkkvenecfkflkkqnyth |
| | | kgldaqaqsvlgypiflergfmdekptiikgktfkgneslftdwfryykeyqnfqtfy |
| | | dtenyplvelekkqadrkretkiyqqkkndvftllmakhifksvfkqdsidrfsledl |
| | | yqsreerlenqekakqtgerntnyiwnktvdlnlcdgkvtvenvklknvgnfikye |
| | | ydqrvqtflkyeenikwqaflikeskeeenypyivereieqyekvrreellkevhlie |
| | | eyilekvkdkeilkkgdnqnfkyyilngllkqlknedvesykvfnlntkpedvninq |
| | | lkqeatdleqkafvltyirnkfahnqlpkkefwdycqekygkiekektyaeyfaevf |
| | | krekealmk |
| Prevotella | WP_0425 | mnipalvenqkkyfgtysvmamlnaqtvldhiqkvadiegeqnennenlwfhp |
| sp. P5-119 | 18169 | vmshlynakngydkqpektmfiierlqsyfpflkimaenqreysngkykqnrvev |
| (SEQ ID No. 137) | | nsndifevlkrafgvlkmyrdltnhyktyeeklidgcefltsteqplsgmiskyytval |
| | | rntkerygyktedlafiqdnikkitkdaygkrksqvntgfflslqdyngdtqkklhlsg |
| | | vgialliclfldkqyiniflsrlpifssynaqseerriiirsfginsiklpkdrihseksnks |
| | | vamdmlnevkrcpdelfttlsaekqsrfriisddhnevlmkrstdrfvplllqyidyg |
| | | klfdhirfhvnmgklryllkadktcidgqtrvrvieqplngfgrleeaetmrkqengtf |
| | | gnsgirirdfenvkrddanpanypyivdtythyilennkvemfisdkgssapllplie |
| | | ddryvvktipscrmstleipamafhmflfgskkteklivdvhnrykrlfqamqkee |
| | | vtaeniasfgiaesdlpqkildlisgnahgkdvdafirltvddmltdterrikrfkddrk |
| | | sirsadnkmgkrgfkqistgkladflakdivlfqpsvndgenkitglnyrimqsaiav |
| | | ydsgddyeakqqfklmfekarligkgttephpflykvfarsipanavdfyerylierk |
| | | fyltglcneikrgnrvdvpfirrdqnkwktpamktlgriysedlpvelprqmfdnei |
| | | kshlkslpqmegidfnnanytyliaeymkrvinddfqtfyqwkrnyhymdmlkg |
| | | eydrkgslqhcftsveereglwkerasrteryrklasnkirsnrqmrnasseeietild |
| | | krlsncrneyqksekvirryrvqdallfllakktlteladfdgerfklkeimpdaekgil |
| | | seimpmsftfekggkkytitsegmklknygdffvlasdkrignllelvgsdivsked |
| | | imeefnkydqcrpeissivfnlekwafdtypelsarvdreekvdfksilkillnnkni |
| | | nkeqsdilrkirnafdhnnypdkgiveikalpeiamsikkafgeyaimk |
| Prevotella | WP_0440 | mnipalvenqkkyfgtysvmamlnaqtvldhiqkvadiegeqnennenlwfhp |
| sp. P4-76 | 72147 | vmshlynakngydkqpektmfiierlqsyfpflkimaenqreysngkykqnrvev |
| (SEQ ID No. 138) | | nsndifevlkrafgvlkmyrdqashyktydeklidgcefltsteqplsgminnyytv |
| | | alrnmnerygyktedlafiqdkrfkfvkdaygkkksqvntgfflslqdyngdtqkkl |
| | | hlsgvgialliclfldkqyiniflsrlpifssynaqseerriiirsfginsikqpkdrihsek |
| | | snksvamdmlneikrcpnelfetlsaekqsrfriisndhnevlmkrssdrfvplllqy |
| | | idygklfdhirfhvnmgklryllkadktcidgqtrvrvieqpingfgrleevetmrkq |
| | | engtfgnsgirirdfenmkrddanpanypyivdtythyilennkvemfisdeetpa |
| | | pllpvieddryvvktipscrmstleipamafhmflfgskkteklivdvhnrykrlfka |
| | | mqkeevtaeniasfgiaesdlpqkiidlisgnahgkdvdafirltvddmladterrikr |
| | | fkddrksirsadnkmgkrgfkqistgkladflakdivlfqpsvndgenkitglnyri |
| | | mqsaiavynsgddyeakqqfklmfekarligkgttephpflykvfvrsipanavdf |
| | | yerylierkfyliglsneikkgnrvdvpfirrdqnkwktpamktlgriydedlpvelp |
| | | rqmfdneikshlkslpqmegidfnnanytyliaeymkrvinddfqtfyqwkrnyr |
| | | ymdmlrgeydrkgslqscftsveereglwkerasrteryrklasnkirsnrqmrnas |
| | | seeietildkrlsnsrneyqksekvirryrvqdallfllakktlteladfdgerfklkeim |
| | | pdaekgilseimpmsftfekggkkytitsegmklknygdffvlasdkrignllelvg |
| | | sdtvskedimeefkkydqcrpeissivfnlekwafdtypelsarvdreekvdfksilk |
| | | illnnkninkeqsdilrkirnafdhnnypdkgvveiralpeiamsikkafgeyaimk |
| Prevotella | WP_0440 | mnipalvenqkkyfgtysvmamlnaqtvldhiqkvadiegeqnennenlwfhp |
| sp. P5-60 | 74780 | vmshlynakngydkqpektmfiierlqsyfpflkimaenqreysngkykqnrvev |
| (SEQ ID No. 139) | | nsndifevlkrafgvlkmyrdltnhyktyeeklidgcefltsteqpfsgmiskyytval |
| | | rntkerygykaedlafiqdnrykftkdaygkrksqvntgsflslqdyngdttkklhls |
| | | gvgialliclfldkqyinlflsrlpifssynaqseerriiirsfginsikqpkdrihseksnk |
| | | svamdmlnevkrcpdelfttlsaekqsrfriisddhnevlmkrssdrfvplllqyidy |
| | | gklfdhirfhvnmgklryllkadktcidgqtrvrvieqpingfgrleevetmrkqeng |
| | | tfgnsgirirdfenmkrddanpanypyivetythyilennkvemfisdeenptpllp |
| | | vieddryvvktipscrmstleipamafhmflfgsektekliidvhdrykrlfqamqk |
| | | eevtaeniasfgiaesdlpqkimdlisgnahgkdvdafirltvddmltdterrikrfkd |
| | | drksirsadnkmgkrgfkqistgkladflakdivlfqpsvndgenkitglnyrimqs |
| | | aiavydsgddyeakqqfklmfekarligkgttephpflykvfvrsipanavdfyery |
| | | lierkfyliglsneikkgnrvdvpfirrdqnkwktpamktlgriysedlpvelprqmf |
| | | dneikshlkslpqmegidfnnanytyliaeymkrvinddfqtfyqwkrnyrymd |
| | | mlrgeydrkgslqhcftsieereglwkerasrteryrklasnkirsnrqmrnasseeie |
| | | tildkrlsncrneyqksekiirryrvqdallfllakktlteladfdgerfklkeimpdaek |
| | | gilseimpmsftfekggkiytitsggmklknygdffvlasdkrignllelvgsntvsk |
| | | edimeefkkydqcrpeissivfnlekwafdtypelparvdrkekvdfwsildvlsnn |
| | | kdinneqsyilrkirnafdhnnypdkgiveikalpeiamsikkafgeyaimk |
| Phaeodactylibacter | WP_0442 | mtntpkrrtlhrhpsyfgaflniarhnafmimehlstkydmedkntldeaqlpnakl |
| xiamenensis | 18239 | fgclkkrygkpdvtegvsrdlrryfpflnyplflhlekqqnaeqaatydinpedieftl |
| (SEQ ID No. 140) | | kgffrllnqmrnnyshyisntdygkfdklpvqdiyeaaifrlldrgkhtkrfdvfesk |
| | | htrhlesnnseyrprslanspdhentvafvtclflerkyafpflsrldcfrstndaaegd |
| | | plirkashecytmfccrlpqpklessdilldmvnelgrcpsalynllseedqarfhikr |
| | | eeitgfeedpdeeleqeivlkrhsdrfpyfalryfddteafqtlrfdvylgrwrtkpvyk |
| | | kriymerdryltqsirtftrlsrllpiyenvkhdavrqneedgklvnpdvtsqfhksw |
| | | iqiesddraflsdriehfsphynfgdqviglkfinpdryaaiqnvfpklpgeekkdkd |
| | | aklvnetadaiistheirslflyhylskkpisagderrfiqvdtetfikqyidtiklffedik |
| | | sgelqpiadppnyqkneplpyvrgdkektqeeraqyrerqkeikerrkelntllqnr |
| | | yglsiqyipsrlreyllgykkvpyeklalqklraqrkevkkrikdiekmrtprvgeqat |
| | | wlaedivfltppkmhtperkttkhpqklnndqfrimqsslayfsvnkkaikkffqke |
| | | tgiglsnretshpflyridvgrcrgildfytgylkykmdwlddaikkvdnrkhgkke |
| | | akkyekylpssiqhktpleldytrlpvylprglfkkaivkalaahadfqvepeednvi |
| | | fcldqlldgdtqdfynwqryyrsalteketdnqlvlahpyaeqilgtiktlegkqknn |
| | | klgnkakqkikdelidlkrakrrlldreqylravqaedralwlmiqerqkqkaeheei |
| | | afdqldlknitkiltesidarlripdtkvditdklplrrygdlrrvakdrrlvnlasyyhva |
| | | glseipydlvkkeleeydrrrvaffehvyqfekevydryaaelrnenpkgestyfsh |
| | | weyvavavkhsadthfnelfkekvmqlrnkfhhnefpyfdwllpevekasaalya |
| | | drvfdvaegyyqkmrklmrq |
| Flavobacterium | WP_0459 | mdnnitvektelglgitynhdkvedkhyfggffnlaqnnidlvaqefkkrlliqgkd |
| sp.316 | 68377 | sinifanyfsdqcsitnlergikilaeyfpvvsyidldeknksksirehlillletinnlrn |
| (SEQ ID No. 141) | | yythyyhkkiiidgslfplldtillkvvleikkkklkedktkqllkkglekemtilfnlm |
| | | kaeqkekkikgwnidenikgavinrafshllyndelsdyrkskyntedetlkdtltes |
| | | gilfllsfflnkkeqeqlkanikgykgkiasipdeeitlknnslrnmathwtyshltyk |
| | | glkhriktdheketllvnmvdylskvpheiyqnlseqnkslfledineymrdneen |
| | | hdsseasrvihpvirkryenkfayfairfldefaefptlrfmvnvgnyihdnrkkdig |
| | | gtslitnrtikqqinvfgniteihkkkndyfekeenkektlewelfpnpsyhfqkeni |
| | | pifidleksketndlakeyakekkkifgssrkkqqntakknretiinlvfdkyktsdrk |
| | | tvtfeqptallsfnelnsflyaflvenktgkelekiiiekianqyqilkncsstvdktndn |
| | | ipksikkivntttdsfyfegkkidieklekditieiektnekletikeneesaqnykrner |
| | | ntqkrklyrkyvfftneigieatwitndilrfldnkenwkgyqhselqkfisqydnyk |
| | | kealgllesewnlesdaffgqnlkrmfqsnstfetfykkyldnrkntletylsaienlkt |
| | | mtdvrpkvlkkkwtelfrffdkkiyllstietkinelitkpinlsrgifeekptfingknp |
| | | nkennqhlfanwfiyakkqtilqdfynlpleqpkaitnlkkhkyklersinnlkiedi |
| | | yikqmvdflyqklfeqsfigslqdlytskekreiekgkakneqtpdesfiwkkqvei |
| | | nthngriiaktkikdigkfknlltdnkiahlisyddriwdfslnndgditkklysintele |
| | | syetirrekllkqiqqfeqflleqeteysaerkhpekfekdcnpnfkkyiiegvinkiip |
| | | nheieeieilkskedvfkinfsdililnndnikkgyllimirnkfahnqlidknlfnfsl |
| | | qlysknenenfseylnkvcqniiqefkeklk |
| Porphyromonas | WP_0462 | mteqserpyngtyytledkhfwaaflnlarhnayitlthidrqlayskaditndqdvls |
| gulae | 01018 | fkalwknfdndlerksrlrslilkhfsflegaaygkklfeskssgnkssknkeltkkek |
| (SEQ ID No. 142) | | eelqanalsldnlksilfdflqklkdfrnyyshyrhsesselplfdgnmlqrlynvfdv |
| | | svqrvkrdhehndkvdphrhfnhlvrkgkkdryghndnpsfkhhfvdsegmvte |
| | | agllffvslflekrdaiwmqkkirgfkggtetyqqmtnevfcrsrislpklkleslrtdd |
| | | wmlldmlnelvrcpkplydrlrekdrarfrvpvdilpdeddtdgggedpfkntlvrh |
| | | qdrfpyfalryfdlkkvftslrfhidlgtyhfaiykkmigeqpedrhltrnlygfgriqd |
| | | faeehrpeewkrlyrdldyfetgdkpyisqttphyhiekgkiglrfmpegqhlwps |
| | | pevgttrtgrskyaqdkrltaeaflsvhelmpmmfyyfllrekyseevsaekvqgri |
| | | krviedvyaiydafardeintlkeldacladkgirrghlpkqmiailsqehkdmeeki |
| | | rkklqemiadtdhrldmldrqtdrkirigrknaglpksgviadwlvrdmmrfqpva |
| | | kdtsgkpinnskansteyrmlqralalfggekkrltpyfrqmnitggnnphpflhetr |
| | | weshtnilsfyrsylrarkaflerigrsdrmenrpflllkepktdrqtivagwksefhlp |
| | | rgifteavrdcliemgydevgsyrevgfmakavplyferacedrvqpfydspfnvg |
| | | nslkpkkgrflskeeraeewergkerfrdleawshsaarriedafagieyaspgnkk |
| | | kieqllrdlslweafesklkvradkinlaklkkeileaqehpyhdfkswqkferelrlv |
| | | knqdiitwmmcrdlmeenkvegldtgtlylkdirpnvqeqgslnvinrvkpmrlp |
| | | vvvyradsrghvhkeeaplatvyieerdtkllkqgnfksfvkdrringlfsfvdtggla |
| | | meqypisklrveyelakyqtarvcvfeltlrleeslltryphlpdesfrkmleswsdpl |
| | | lakwpelhgkvrlliavrnafshnqypmydeavfssirkydpsspdaieermglni |
| | | ahrlseevkqaketveriiqv |
| WP_04743 | Chryseobacterium | metqtighgiaydhskiqdkhffggflnlaennikavlkafsekfnvgnvdvkqfa |
| 1796 | sp. YR477 | dvslkdnlpdndfqkrvsflkmyfpvvdfinipnnrakfrsdlttlfksvdqlrnfyth |
| (SEQ ID No. 143) | | yyhkpldfdaslfillddifartakevrdqkmkddktrqllskslseelqkgyelqlerl |
| | | kelnrlgkkvnihdqlgikngvinnafnhliykdgesfktkltyssaltsfesaengiei |
| | | sqsgllfllsmflkrkeiedlknrnkgfkakvvidedgkvnglkfmathwvfsylcf |
| | | kglksklstefheetlliqiidelskvpdelycafdketrdkfiedineyvkeghqdfsl |
| | | edakvihpvirkryenkfnyfairfldefvkfpslrfqvhvgnyvhdrriknidgttfe |
| | | tervvkdrikvfgrlseissykaqylssvsdkhdetgweifpnpsyvfinnnipihis |
| | | vdtsfkkeiadfkklrraqvpdelkirgaekkrkfeitqmigsksvlnqeepiallsln |
| | | eipallyeilingkepaeieriikdklnerqdviknynpenwlpasqisrrlrsnkgeri |
| | | intdkllqlvtkellvteqklkiisdnrealkqkkegkyirkfiftnselgreaiwladdi |
| | | krfmpadvrkewkgyqhsqlqqslafynsrpkealailesswnlkdekiiwnewil |
| | | ksftqnkffdafyneylkgrkkyfaflsehivqytsnaknlqkfikqqmpkdlfekr |
| | | hyiiedlqteknkilskpfifprgifdkkptfikgvkvedspesfanwyqygyqkdh |
| | | qfqkfydwkrdysdvflehlgkpfinngdrrtlgmeelkeriiikqdlkikkikiqdlf |
| | | lrliaenlfqkvfkysaklplsdfyltqeermekenmaalqnvreegdkspniikdnf |
| | | iwskmipykkgqiienavklkdigklnvlslddkvqtllsyddakpwskialenefs |
| | | igensyevirreklfkeiqqfeseilfrsgwdginhpaqlednrnpkflcmyivngilr |
| | | ksaglysqgediwfeynadfnnldadvletkselvqlaflvtairnkfahnqlpakef |
| | | yfyirakygfadepsvalvylnftkyainefkkvmi |
| Riemerella | WP_0493 | mffsfhnaqrvifkhlykafdaslrmvkedykahftvnitrdfahlnrkgknkqdn |
| anatipestifer | 54263 | pdfnryrfekdgfftesgllfftnlfldkrdaywmlkkvsgfkashkqrekmttevfc |
| (SEQ ID No. 144) | | rsrillpklrlesrydhnqmlldmlselsrcpkllyeklseenkkhfqveadgfldeie |
| | | eeqnpfkdtlirhqdrfpyfalryldlnesfksirfqvdlgtyhyciydkkigdeqekr |
| | | hltrtllsfgrlqdfteinrpqewkaltkdldyketsnqpfiskttphyhitdnkigfrlgt |
| | | skelypsleikdganriakypynsgfvahafisvhellplmfyqhltgksedllketvr |
| | | hiqriykdfeeerintiedlekanqgrlplgafpkqmlgllqnkqpdlsekakikiekl |
| | | iaetkllshrintklksspklgkrrekliktgvladwlvkdfmrfqpvaydaqnqpik |
| | | sskanstefwfirralalyggeknrlegyfkqtnligntnphpflnkfnwkacrnlvdf |
| | | yqqyleqrekfleaiknqpwepyqyclllkipkenrknlvkgweqggislprglfte |
| | | airetlsedlmlskpirkeikkhgrvgfisraitlyfkekyqdkhqsfynlsykleaka |
| | | pllkreehyeywqqnkpqsptesqrlelhtsdrwkdyllykrwqhlekklrlyrnqd |
| | | vmlwlmtleltknhfkelnlnyhqlklenlavnvqeadaklnpinqtlpmvlpvkv |
| | | ypatafgevqyhktpirtvyireehtkalkmgnfkalvkdrrlnglfsfikeendtqk |
| | | hpisqlrlrreleiyqslrvdafketlsleekllnkhtslsslenefralleewkkeyaass |
| | | mvtdehiafiasvrnafchnqypfykealhapiplftvaqptteekdglgiaeallkvl |
| | | reyceivksqi |
| Porphyromonas | WP_0529 | mteqnekpyngtyytledkhfwaaffnlarhnayitlahidrqlaykaditndedil |
| gingivalis | 12312 | ffkgqwknldndlerkarlrslilkhfsflegaaygkklfesqssgnksskkkeltkke |
| (SEQ ID No. 145) | | keelqanalsldnlksilfdflqklkdfrnyyshyrhpesselplfdgnmlqrlynvfd |
| | | vsvqrvkrdhehndkvdphrhfnhlvrkgkkdkygnndnpffkhhfvdreekvt |
| | | eagllffvslflekrdaiwmqkkirgfkggteayqqmtnevfcrsrislpklkleslrtd |
| | | dwmlldmlnelvrcpkllydrlreedrarfrvpvdilsdeddtdgteedpfkntlvrh |
| | | qdrfpyfalryfdlkkvftslrfhidlgtyhfaiykknigeqpedrhltrnlygfgriqdf |
| | | aeehrpeewkrlvrdldyfetgdkpyitqttphyhiekgkiglrfvpegqllwpspe |
| | | vgatrtgrskyaqdkrftaeaflsvhelmpmmfyyfllrekyseeasaekvqgrikr |
| | | viedvyavydafardeintrdeldacladkgirrghlprqmiailsqehkdmeekvr |
| | | kklqemiadtdhrldmldrqtdrkirigrknaglpksgviadwlvrdmmrfqpva |
| | | kdtsgkpinnskansteyrmlqralalfggekerltpyfrqmnitggnnphpflhetr |
| | | weshtnilsfyrsylkarkaflqsigrsdreenhrflllkepktdrqtivagwksefhlp |
| | | rgifteavrdcliemgydevgsykevgfmakavplyferackdrvqpfydypfnv |
| | | gnslkpkkgrflskekraeewesgkerfrdleawshsaarriedafvgieyaswenk |
| | | kkieqllqdlslwetfesklkvkadkiniaklkkeileakehpyhdfkswqkferelrl |
| | | vknqdiitwmmcrdlmeenkvegldtgtlylkdirtdvqeqgslnylnhvkpmrl |
| | | pvvvyradsrghvhkeeaplatvyieerdtkllkqgnfksfvkdrrlnglfsfvdtgal |
| | | ameqypisklrveyelakyqtarvcafeqtleleeslltryphlpdesfremleswsd |
| | | plldkwpdlqrevrlliavrnafshnqypmydetifssirkydpssldaieermglni |
| | | ahrlseevklakemveriiqa |
| Porphyromonas | WP_0580 | mteqnekpyngtyytlkdkhfwaaffnlarhnayitlthidrqlayskaditndedilf |
| gingivalis | 19250 | fkgqwknldndlerkarlrslilkhfsflegaaygkklfesqssgnksskkkeltkke |
| (SEQ ID No. 146) | | keelqanalsldnlksilfdflqklkdfrnyyshyrhpesselpmfdgnmlqrlynvf |
| | | dvsvqrvkrdhehndkvdphrhfnhlvrkgkkdregnndnpffkhhfvdregkv |
| | | teagllffvslflekrdaiwmqkkirgfkggtetyqqmtnevfcrsrislpklkleslrt |
| | | ddwmlldmlnelvrcpkslydrlreedracfrvpvdilsdeddtdgaeedpfkntlv |
| | | rhqdrfpyfalryfdlkkvftslrfhidlgtyhfaiykknigeqpedrhltrnlygfgriq |
| | | dfaeehrpeewkrlyrdldcfetgdkpyitqttphyhiekgkiglrfvpegqhlwps |
| | | pevgatrtgrskyaqdkrftaeaflsvhelmpmmfyyfllrekyseevsaervqgri |
| | | krviedvyavydafardeintrdeldacladkgirrghlprqmiailsqkhkdmeek |
| | | vrkklqemiadtdhrldmldrqtdrkirigrknaglpksgviadwlvrdmmrfqpv |
| | | akdtsgkpinnskansteyrmlqralalfggekerltpyfrqmnitggnnphpflhet |
| | | rweshtnilsfyrsylkarkaflqsigrsdrvenhrifilkepktdrqtivagwkgefhl |
| | | prgifteavrdcliemgldevgsykevgfmakavplyferackdrvqpfydypfnv |
| | | gnslkpkkgrflskekraeewesgkerfrdleawshsaarriedafagienasrenk |
| | | kkieqllqdlslwetfesklkvkadkiniaklkkeileakehpyldfkswqkferelrl |
| | | vknqdiitwmmcrdlmeenkvegldtgtlylkdirtdvqeqgslnylnhvkpmrl |
| | | pvvvyradsrghvhkeqaplatvyieerdtkllkqgnfksfvkdrringlfsfvdtgal |
| | | ameqypisklrveyelakyqtarvcafeqtleleeslltryphlpdenfrkmleswsd |
| | | plldkwpdlhrkvrlliavrnafshnqypmydeavfssirkydpsspdaieermgl |
| | | niahrlseevkqakemaeriiqa |
| Flavobacterium | WP_0603 | mssknesynkqktfnhykqedkyffggflnnaddnlrqvgkefktrinfnhnnnel |
| columnare | 81855 | asvfkdyfnkeksvakrehalnllsnyfpvleriqkhtnhnfeqtreifellldtikklrd |
| (SEQ ID No. 147) | | yythhyhkpitinpkvydflddtlldvlitikkkkvkndtsrellkekfrpeltqlknqk |
| | | reelikkgkklleenlenavfnhclrpfleenktddkqnktvslrkyrkskpneetsitl |
| | | tqsglvflisfflhrkefqvftsglegfkakvntikeeeislnknnivymithwsysyy |
| | | nfkglkhriktdqgvstleqnntthsltntntkealltqivdylskvpneiyetlsekqq |
| | | kefeedineymrenpenedstfssivshkvirkryenkfnyfamrfldeyaelptlrf |
| | | mvnfgdyikdrqkkilesiqfdseriikkeihlfeklglvteykknvylketsnidlsrf |
| | | plfpspsyvmannnipfyidsrsnnldeylnqkkkaqsqnrkrnitfekynkeqsk |
| | | daiiamlqkeigvkdlqqrstigllscnelpsmlyevivkdikgaelenkiaqkireq |
| | | yqsirdftldspqkdnipttltktistdtsvtfenqpidiprlknalqkeltltqekllnvkq |
| | | heievdnynrnkntykfknqpkdkvddnklqrkyvfyrneigqeanwlasdlihf |
| | | mknkslwkgymhnelqsflaffedkkndcialletvfnlkedciltkdlknlflkhg |
| | | nfidfykeylklkedflntestflengfiglppkilkkelskrlnyifivfqkrqfiikele |
| | | ekknnlyadainlsrgifdekptmipfkkpnpdefaswfvasyqynnyqsfyeltp |
| | | dkiendkkkkyknlrainkvkiqdyylklmvdtlyqdlfnqpldkslsdfyvsktdr |
| | | ekikadakayqkrndsflwnkvihlslqnnritanpklkdigkykralqdekiatllty |
| | | ddrtwtyalqkpekenendykelhytalnmelqeyekvrskkllkqvqelekqild |
| | | kfydfsnnathpedleiedkkgkrhpnfklyitkallkneseiinlenidieilikyydy |
| | | nteklkekiknmdedekakivntkenynkitnvlikkalvliiirnkmahnqyppk |
| | | fiydlatrfvpkkeeeyfacyfnrvfetittelwenkkkakeiv |
| Porphyromonas | WP_0611 | mteqnerpyngtyytledkhfwaaffnlarhnayitlthidrqlayskaditndedilf |
| gingivalis | 56470 | fkgqwknldndlerkarlrslilkhfsflegaaygkklfenkssgnksskkkeltkke |
| (SEQ ID No. 148) | | keelqanalsldnlksilfdflqklkdfrnyyshyrhpesselplfdgnmlqrlynvfd |
| | | vsvqrvkrdhehndkvdphrhfnhlvrkgkkdregnndnpfflchhfvdregkvte |
| | | agllffvslflekrdaiwmqkkirgfkggteayqqmtnevfcrsrislpklkleslrtd |
| | | dwmlldmlnelvrcpkslydrlreedrarfrvpvdilsdeddtdgteedpfkntlvrh |
| | | qdrfpyfalryfdlkkvftslrfhidlgtyhfaiykknigeqpedrhltrnlygfgriqdf |
| | | aeehrpeewkrlyrdldyfetgdkpyitqttphyhiekgkiglrfvpegqhlwpspe |
| | | vgatrtgrskyaqdkrltaeaflsvhelmpmmfyyfllrekyseevsaekvqgrikr |
| | | viedvyavydafargeidtldrldacladkgirrghlprqmiailsqehkdmeekvr |
| | | kklqemiadtdhrldmldrqtdrkirigrknaglpksgviadwlvrdmmrfqpva |
| | | kdtsgkpinnskansteyrmlqralalfggekerltpyfrqmnitggnnphpflhetr |
| | | weshtnilsfyrsylkarkaflqsigrsdreenhrflllkepktdrqtlvagwksefhlp |
| | | rgifteavrdcliemgydevgsykevgfmakavplyferackdrvqpfydypfnv |
| | | gnslkpkkgrflskekraeewesgkerfrlaklkkeileakehpyldfkswqkferel |
| | | rlvknqdiitwmmerdlmeenkvegldtgtlylkdirtevqeqgslnvinrvkpmr |
| | | lpvvvyradsrghvhkeqaplatvyieerdtkllkqgnfksfvkdrrlnglfsfvdtg |
| | | glameqypisklrveyelakyqtarvcafeqtleleeslltrcphlpdknfrkmlesw |
| | | sdplldkwpdlqrevwlliavrnafshnqypmydeavfssirkydpsspdaieer |
| | | mglniahrlseevkqakemaeriiqa |
| Porphyromonas | WP_0611 | mntvpasenkgqsrtveddpqyfglylnlarenlieveshvrikfgkkklneeslkq |
| gingivalis | 56637 | sllcdhllsvdrwtkvyghsrrylpflhyfdpdsqiekdhdsktgvdpdsaqrlirely |
| (SEQ ID No. 149) | | slldflrndfshnrldgttfehlevspdissfitgtyslacgraqsrfadffkpddfvlakn |
| | | rkeqlisvadgkecltvsglafficlfldreqasgmlsrirgfkrtdenwaravhetfcd |
| | | lcirhphdrlessntkeallldmlnelnrcprilydmlpeeeraqflpaldensmnnls |
| | | enslneesrllwdgssdwaealtkrirhqdrfpylmlrfieemdllkgirfrvdlgeiel |
| | | dsyskkvgrngeydrtitdhalafgklsdfqneeevsrmisgeasypvrfslfaprya |
| | | iydnkigychtsdpvypksktgekralsnpqsmgfisvhdlrklllmellcegsfsr |
| | | mqsgflrkanrildetaegklqfsalfpemrhrfippqnpkskdrrekaettlekykq |
| | | eikgrkdklnsqllsafdmnqrqlpsrlldewmnirpashsvklrtyvkqlnedcrlr |
| | | lrkfrkdgdgkaraiplvgematflsqdivrmiiseetkklitsayynemqrslaqya |
| | | geenrrqfraivaelhlldpssghpflsatmetahrytedfykcylekkrewlaktfyr |
| | | peqdentkrrisvffvpdgearkllpllirrrmkeqndlqdwirnkqahpidlpshlf |
| | | dskimellkykdgkkkwneafkdwwstkypdgmqpfyglrrelnihgksysyi |
| | | psdgkkfadcythlmektvqdkkrelrtagkpvppdlaadikrsfhravnerefmlr |
| | | lvqeddrlmlmainkmmtdreedilpglknidsildkenqfslavhakvlekegeg |
| | | gdnslslvpatieikskrkdwskyiryrydrrvpglmshfpehkatldevktllgeyd |
| | | rcrikifdwafalegaimsdrdlkpylhesssregksgehstlvkmlvekkgcltpde |
| | | sqylilirnkaahnqfpcaaempliyrdvsakvgsiegssakdlpegsslvdslwkk |
| | | yemiirkilpildpenrffgkllnnmsqpindl |
| Riemerella | WP_0617 | mffsfhnaqrvifkhlykafdaslrmykedykahftvnltrdfahlnrkgknkqdn |
| anatipestifer | 10138 | pdfnryrfekdgfftesgllfftnlfldkrdaywmlkkvsgfkashkqsekmttevfc |
| (SEQ ID No. 150) | | rsrillpklrlesrydhnqmlldmlselsrcpkllyeklsekdkkcfqveadgfldeie |
| | | eeqnpfkdtlirhqdrfpyfalryldlnesfksirfqvdlgtyhyciydkkigyeqekr |
| | | hltrtllnfgrlqdfteinrpqewkaltkdldynetsnqpfiskttphyhitdnkigfrlrt |
| | | skelypslevkdganriakypynsdfvahafisisvhellplmfyqhltgksedllket |
| | | vrhiqriykdfeeerintiedlekanqgrlplgafpkqmlgllqnkqpdlsekakikie |
| | | kliaetkllshrintklksspklgkrrekliktgvladwlvkdfmrfqpvvydaqnqpi |
| | | ksskanstesrlirralalyggeknrlegyfkqtnligntnphpflnkfnwkacrnlvd |
| | | fyqqyleqrekfleaikhqpwepyqyclllkvpkenrknlvkgweqggislprglft |
| | | eairetlskdltlskpirkeikkhgrvgfisraitlyfkekyqdkhqsfynlsykleaka |
| | | pllkkeehyeywqqnkpqsptesqrlelhtsdrwkdyllykrwqhlekklrlyrnq |
| | | dimlwlmtleltknhfkelnlnyhqlklenlavnvqeadaklnpinqtlpmvlpvk |
| | | vypttafgevqyhetpirtvyireeqtkalkmgnfkalvkdrhlnglfsfikeendtq |
| | | khpisqlrlrreleiyqslrvdafketlsleekllnkhaslsslenefrtlleewkkkyaas |
| | | smvtdkhiafiasvrnafchnqypfyketlhapillftvaqptteekdglgiaeallrvl |
| | | reyceivksqi |
| Flavobacterium | WP_0637 | mssknesynkqktfnhykqedkyffggflnnaddnlrqvgkefktrinfnhnnnel |
| columnare | 44070 | asvfkdyfnkeksvakrehalnllsnyfpvleriqkhtnhnfeqtreifellldtikklrd |
| (SEQ ID No. 151) | | yythhyhkpitinpkiydflddtlldvlitikkkkvkndtsrellkeklrpeltqlknqk |
| | | reelikkgkklleenlenavfnhclrpfleenktddkqnktvslrkyrkskpneetsitl |
| | | tqsglvflmsfflhrkefqvftsglegfkakvntikeekislnknnivymithwsysy |
| | | ynfkglkhriktdqgvstleqnntthsltntntkealltqivdylskvpneiyetlsekq |
| | | qkefeedineymrenpenedstfssivshkvirkryenkfnyfamrfldeyaelptlr |
| | | fmvnfgdyikdrqkkilesiqfdseriikkeihlfeklglvteykknvylketsnidlsr |
| | | fplfpspsyvmannnipfyidsrsnnldeylnqkkkaqsqnrkrnitfekynkeqs |
| | | kdaiiamlqkeigvkdlqqrstigllscnelpsmlyevivkdikgaelenkiaqkire |
| | | qyqsirdftlnspqkdnipttliktistdtsvtfenqpidiprlknaiqkelaltqekllnv |
| | | kqheievnnynrnkntykfknqpkdkvddnklqrkyvfyrneigqeanwlasdli |
| | | hfmknkslwkgymhnelqsflaffedkkndcialletvfnlkedciltkdlknlflkh |
| | | gnfidfykeylklkedflntestflengfiglppkilkkelskrinyifivfqkrqfiikel |
| | | eekknnlyadainlsrgifdekptmipfkkpnpdefaswfvasyqynnyqsfyelt |
| | | pdkiendkkkkyknlrainkvkiqdyylklmvdtlyqdlfnqpldkslsdfyvskt |
| | | drekikadakayqkrndsflwnkvihlslqnnritanpklkdigkykralqdekiatl |
| | | ltyddrtwtyalqkpekenendykelhytalnmelqeyekvrskkllkqvqelekqi |
| | | ldkfydfsnnathpedleiedkkgkrhpnfklyitkallkneseiinlenidieilikyy |
| | | dynteklkekiknmdedekakivntkenynkitnvlikkalvliiirnkmahnqyp |
| | | pkfiydlatrfvpkkeeeyfacyfnrvfetittelwenkkkakeiv |
| Riemerella | WP_0649 | mekplppnvytlkhkffwgaflniarhnafitichineqlglttppnddkiadvvcgt |
| anatipestifer | 70887 | wnnilnndhdllkksqltelilkhfpflaamcyhppkkegkkkgsqkeqqkeken |
| (SEQ ID No. 152) | | eaqsqaealnpselikvlktivkqlrtlrnyyshhshkkpdaekdifkhlykafdaslr |
| | | mvkedykahftvnitqdfahlnrkgknkqdnpdfdryrfekdgfftesgllfftnlfl |
| | | dkrdaywmlkkvsgfkashkqsekmttevfcrsrillpklrlesrydhnqmlldml |
| | | selsrypkllyeklseedkkrfqveadgfldeieeeqnpfkdtlirhqdrfpyfalryld |
| | | lnesfksirfqvdlgtyhyciydkkigdeqekrhltrtllsfgrlqdfteinrpqewkalt |
| | | kdldyketskqpfiskttphyhitdnkigfrlgtskelypslevkdganriaqypyns |
| | | dfvahafisvhellplmfyqhltgksedllketvrhiqriykdfeeerintiedlekanq |
| | | grlplgafpkqmlgllqnkqpdlsekakikiekliaetkllshrintklksspklgkrre |
| | | kliktgvladwlvkdfmrfqpvaydaqnqpiesskanstefqliqralalyggeknrl |
| | | egyfkqtnligntnphpflnkfnwkacrnlvdfyqqyleqrekfleaiknqpwepy |
| | | qyclllkipkenrknlvkgweqggislprglfteairetlskdltlskpirkeikkhgrv |
| | | gfisraitlyfrekyqddhqsfydlpykleakasplpkkehyeywqqnkpqsptelq |
| | | rlelhtsdrwkdyllykrwqhlekklrlyrnqdvmlwlmtleltknhfkelnlnyhq |
| | | lklenlavnvqeadaklnpinqtlpmvlpvkvypatafgevqyqetpirtvyireeqt |
| | | kalkmgnfkalvkdrringlfsfikeendtqkhpisqlrlrreleiyqslrvdafketlnl |
| | | eekllkkhtslssvenkfrilleewkkeyaassmvtdehiafiasvrnafchnqypfy |
| | | eealhapiplftvaqqtteekdglgiaeallrvlreyceivksqi |
| Sinomicrobium | WP_0723 | mestttlglhlkyqhdlfedkhyfgggvnlavqniesifqafaerygiqnplrkngvp |
| oceani | 19476.1 | ainnifhdnisisnykeylkflkqylpvvgfleksneinifefredfeilinaiyklrhfy |
| (SEQ ID No. 153) | | thyyhspikledrfytclnelfvavaiqvkkhkmksdktrqllnknlhqllqqlieqkr |
| | | eklkdkkaegekvsldtksienavlndafvhlldkdenirlnyssrlsediitkngitlsi |
| | | sgllfllslflqrkeaedlrsriegfkgkgnelrfmathwvfsylnvkrikhrlntdfqke |
| | | tlliqiadelskvpdevyktldhenrskfledineyiregnedaslnestvvhgvirkry |
| | | enkfhylvlryldefvdfpslrfqvhlgnyihdrrdkvidgtnfitnrvikepikvfgkl |
| | | shvsklksdymeslsrehkngwdvfpnpsynfvghnipifinlrsasskgkelyrdl |
| | | mkiksekkkksreegipmerrdgkptkieisnqidrnikdnnfkdiypgeplamls |
| | | lnelpallfellrrpsitpqdiedrmveklyerfqiirdykpgdglstskiskklrkadns |
| | | trldgkkllraiqtetrnareklhtleenkalqknrkrrtvyttreqgreaswlaqdlkrf |
| | | mpiasrkewrgyhhsqlqqilafydqnpkqplelleqfwdlkedtyvwnswihks |
| | | lsqhngfvpmyegylkgrlgyykklesdiigfleehkvlkryytqqhlnvifrerlyfi |
| | | ktetkqklellarplvfprgifddkptfvqdkkvvdhpelfadwyvysykddhsfqe |
| | | fyhykrdyneifetelswdidfkdnkrqlnpseqmdlfrmkwdlkikkikiqdiflk |
| | | ivaediylkifghkiplslsdfyisrgerltldeqavaqsmrlpgdtsenqikesnlwqt |
| | | tvpyekeqirepkiklkdigkfkyflqqqkvinllkydpqhvwtkaeleeelyigkh |
| | | syevvrremllqkchqlekhileqfrfdgsnhpreleqgnhpnfkmyivngiltkrg |
| | | eleieaenwwlelgnsknsldkvevelltmktipeqkafllilirnkfahnqlpadny |
| | | fhyasnlmnlkksdtyslfwftvadtivqefmsl |
| Reichenbachiella | WP_0731 | mktnpliassgekpnykkfntesdksfkkifqnkgsiapiaekacknfeikskspvn |
| agariperforans | 24441.1 | rdgrlhyfsvghafknidsknvfryeldesqmdmkptqflalqkeffdfqgalngll |
| (SEQ ID No. 154) | | khirnvnshyvhtfekleiqsinqklitflieafelavihsylneeelsyeaykddpqsg |
| | | qklvqflcdkfypnkeheveerktilaknkrqalehllfievtsdidwklfekhkvfti |
| | | sngkylsfhaclfllslflykseanqliskikgfkrnddnqyrskrqiftffskkftsqdv |
| | | nseeqhlvkfrdviqylnhypsawnkhlelksgypqmtdklmryiveaeiyrsfp |
| | | dqtdnhrfllfaireffgqscldtwtgntpinfsnqeqkgfsyeintsaeikdietklkal |
| | | vlkgpinfkekkeqnrlekdlrrekkeqptnrykeklltriqhnmlyvsygrnqdrf |
| | | mdfaarflaetdyfgkdakfkmyqfytsdeqrdhlkeqkkelpkkefeklkyhqs |
| | | klvdyftyaeqqarypdwdtpfvvennaiqikvtlfngakkivsvqrnlmlylleda |
| | | lysekrenagkglisgyfvhhqkelkdqldileketeisreqkrefkkllpkrllhrysp |
| | | aqindttewnpmevileeakaqeqryqlllekailhqteedflkrnkgkqfklrfvrk |
| | | awhlmylkelymnkvaehghhksfhitkeefndfcrwmfafdevpkykeylcd |
| | | yfsqkgffnnaefkdliesstslndlyektkqrfegwskdltkqsdenkyllanyesm |
| | | lkddmlyvnishfisyleskgkinrnahghiaykalnnvphlieeyyykdrlapeey |
| | | kshgklynklktvkledallyemamhylslepalvpkvktkvkdilssniafdikda |
| | | aghhlyhllipfhkidsfvalinhqsqqekdpdktsflakiqpylekvknskdlkavy |
| | | hyykdtphtlryedlnmihshivsqsvqftkvalkleeyfiakksitlqiarqisyseia |
| | | dlsnyftdevrntafhfdypetaysmilqgiesefldreikpqkpkslselstqqvsvc |
| | | tafletlhnnlfdrkddkkerlskareryfeqin |

[0761] In certain example embodiments, the RNA-targeting effector protein is a Cas13c effector protein as disclosed in PCT Application No. US18/39595 filed Jun. 26, 2018, and PCT Application No. US 2017/047193 filed Aug. 16, 2017. Example wildtype orthologue sequences of Cas13c are provided in Table 4B below. In certain example embodiments, the CRISPR effector protein is a Cas13c protein from Table 4a or 4b.

TABLE 4a

| | |
|---|---|
| Fusobacterium | mekfrrqnrnsiikiiisnydtkgikelkvryrkqaqldtfiikteivnndifiksiiekareky |
| necrophorum | rysflfdgeekyhfknkssveivkkdifsqtpdnmirnykitlkiseknprvveaeiedlm |
| sub sp. | nstilkdgrrsarreksmterklieekvaknysllancpmeevdsikiykikrfltyrsnmll |
| funduliform | yfasinsfl cegikgkdneteeiwhlkdndvrkekvrenfknkliqstenynsslknqiee |
| e ATCC | kekllrkefkkgafyrtiikklqqerikelseksltedcekiiklysklrhslmhydyqyfenl |
| 51357 | fenkknddlmkdlnldlfkslplirkmklnnkvnyledgdtlfvlqktkkaktlyqiydal |
| contig00003 | ceqkngfnkfindffvsdgeentvfkqiinekfqsemeflekrisesekkneklkkklds |
| (SEQ ID No. | mkahfrninsedtkeayfwdihssrnyktkynerknlvneytellgsskekkllreeitkin |
| 155) | rqllklkqemeeitkknslfrleykmkiafgflfcefdgniskfkdefdasnqekiiqyhkn |
| | gekyltsflkeeekekfnlekmqkiiqkteeedwllpetknnlfkfylltylllpyelkgdfl |
| | gfvkkhyydiknvdfidenqnniqvsqtvekqedyfyhkirlfekntkkyeivkysivp |
| | neklkqyfedlgidikyltveqksevseeknkkvslknngmfnktillfvfkyyqiafklf |
| | ndielyslfflreksgkpleifrkeleskmkdgylnfgqllyvvyevlvknkdldkilskki |
| | dyrkdksfspeiaylrnflshinyskfldnfmkintnksdenkevlipsikiqkmiqfiekc |
| | nlqnqidfdfnfvndfymrkekmffiqlkqifpdinstekqkmnekeeilrnryhltdkk |
| | neqikdeheaqsqlyekilslqkiyssdknnfygrlkeekllflekqgkkklsmeeikdki |
| | agdisdllgilkkeitrdikdkltekfryceekllnlsfynhqdkkkeesirvflirdknsdnf |
| | kfesilddgsnkifiskngkeitiqccdkvletliiekntlkissngkiisliphysysidvky |
| Fusobacterium | mekfrrqnrssiikiiisnydtkgikelkvryrkqaqldtfiikteivnndifiksiiekareky |
| necrophorum | rysflfdgeekyhfknkssveivkkdifsqtpdnmirnykitlkiseknprvveaeiedlm |
| DJ-2 | nstilkdgrrsarreksmterklieekvaenysllancpmeevdsikiykikrfltyrsnmll |
| contig0065, | yfasinsflcegikgkdneteeiwhlkdndvrkekvkenfknkliqstenynsslknqiee |
| whole | kekllrkeskkgafyrtiikklqqerikelseksltedcekiiklyselrhplmhydyqyfen |
| genome | lfenkenseltknlnldiflcslplvrkmk1nnkvnyledndtlfvlqktkkaktlyiydalc |
| shotgun | eqkngfnkfindffvsdgeentvfkqiinekfqseieflekrisesekkneklkkkldsmk |
| sequence | ahfrninsedtkeayfwdihssrnyktkynerknlvneytellgsskekkllreeitkinrql |
| (SEQ ID No. | lklkqemeeitkknslfrleykmkmafgflfcefdgnisrfkdefdasnqekiiqyhkng |
| 156) | ekyltyflkeeekekfnlkklqetiqktgeenwllpqnknnlfkfylltylllpyelkgdflgf |
| | vkkhyydiknvdfmdenqsskiieskeddfyhkirlfekntkkyeivkysivpdkklkq |
| | yfkdlgidtkylildqksevsgeknkkvslknngmfnktillfvfkyyqiafklfndielysl |
| | fflreksgkpfevflkelkdkmigkqlnfgqllyvvyevlvknkdlseilseridyrkdmc |
| | fsaeiadlrnfl shiny skfldnfmkintnksdenkevlipsikiqkmikfi eecnlqsqidf |
| | dfnfvndfymrkekmffiqlkqifpdinstekqkmnekeeilrnryhltdkkneqikde |
| | heaqsqlyekilslqkiyssdknnfygrlkeekllflekqekkklsmeeikdkiagdisdll |
| | gilkkeitrdikdkltekfryceekllnlsfynhqdkkkeesirvflirdknsdnfkfesildd |
| | gsnkifiskngkeitiqccdkvletliiekntlkissngkiisliphysysidvky |
| Fusobacterium | mkvryrkqaqldtfiikteivnndifiksiiekarekyrysflfdgeekyhfknkssveivk |
| necrophorum | ndifsqtpdnmirnykitlkiseknprvveaeiedlmnstilkdgrrsarreksmterkliee |
| BFTR-1 | kvaenysllancpieevdsikiykikrfltyrsnmllyfasinsflcegikgkdneteeiwhl |
| contig0068 | kdndvrkekvkenfknkliqstenynsslknqieekeklsskefkkgafyrtiikklqqeri |
| (SEQ ID No. | kelseksltedcekiiklyselrhplmhydyqyfenlfenkenseltknlnldifkslplvrk |
| 157) | mklnnkvnyledndtlfvlqktkkaktlyqiydalceqkngfnkfindffvsdgeentvf |
| | kqiinekfqsemeflekrisesekkneklkkkldsmkahfrninsedtkeayfwdihssr |
| | nyktkynerknlvneytkllgsskekkllreeitkinrqllklkqemeeitkknslfrleyk |
| | mkiafgflfcefdgniskfkdefdasnqekiiqyhkngekyltsflkeeekekfnlekmq |
| | kiiqkteeedwllpetknnlfkfylltylllpyelkgdflgfvkkhyydiknvdfmdenqn |
| | niqvsqtvekqedyfyhkirlfekntkkyeivkysivpneklkqyfedlgidikyltgsve |
| | sgekwlgenlgidikyltveqksevseeknkkvslknngmfnktillfvfkyyqiafklfn |
| | dielyslfflreksekpfevfleelkdkmigkqlnfgqllyvvyevlvknkdldkilskkid |
| | yrkdksfspeiaylrnflshinyskfldnfmkintnksdenkevlipsikiqkmiqfiekcn |
| | lqnqidfdfnfvndfymrkekmffiqlkqifpdinstekqkksekeeilrkryhlinkkne |
| | qikdeheaqsqlyekilslqkifscdknnfyrrlkeekllflekqgkkkismkeikdkiasd |
| | isdllgilkkeitrdikdkltekfryceekllnisfynhqdkkkeegirvflirdknsdnfkfes |
| | ilddgsnkifiskngkeitiqccdkvletlmiekntlkissngkiisliphysysidvky |
| Fusobacterium | mtekksiifknkssveivkkdifsqtpdnmirnykitlkiseknprvveaeiedlmnstilk |
| necrophorum | dgrrsarreksmterklieekvaenysllancpmeevdsikiykikrfltyrsnmllyfasi |
| subsp. | nsflcegikgkdneteeiwhlkdndvrkekvkenfknkliqstenynsslknqieekekll |
| funduliform | rkeskkgafyrtiikklqqerikelseksltedcekiiklyselrhplmhydyqyfenlfenk |
| e 1_1_36S | enseltknlnldifkslplvrkmk1nnkvnyledndtlfvlqktkkaktlyqiydalceqkn |
| cont1.14 | gfnkfindffvsdgeentvfkqiinekfqsemeflekrisesekkneklkkkfdsmkahf |
| (SEQ ID No. | hninsedtkeayfwdihsssnyktkynerknlvneytellgsskekkllreeitqinrkllkl |
| 158) | kqemeeitkknslfrleykmkiafgflfcefdgniskfkdefdasnqekiiqyhkngekyl |
| | tyflkeeekekfnlekmqkiiqkteeedwllpetknnlfkfylltylllpyelkgdflgfvkk |
| | hyydiknvdfmdenqnniqvsqtvekqedyfyhkirlfekntkkyeivkysivpneklk |
| | qyfedlgidikyltgsvesgekwlgenlgidikyltveqksevseekikkfl |
| Fusobacterium | mgkpnrssiikiiisnydnkgikevkvrynkqaqldtflikselkdgkfilysivdkareky |
| perfoetens | rysfeidktninkneiliikkdiysnkedkvirkyilsfevsekndrtivtkikdcletqkkek |
| ATCC | ferentrrliseterkllseetqktyskiaccspedidsvkiykikrylayrsnmllffslindif |
| 29250 | vkgvvkdngeevgeiwriidskeidekktydllvenfkkrmsqefinykqsienkieknt |
| T364DRAF | nkikeieqklkkekykkeinrlkkqlielnrendllekdkielsdeeirediekilkiysdlrh |
| T_scaffold0 | klmhynyqyfenlfenkkiskeknedvnitelldlnlfrylplvrqlklenktnylekedki |
| 0009.9_C | tvlgvsdsaikyysyynflceqkngfnnfinsffsndgeenksfkekinlslekeieimek |
| (SEQ ID No. | etnekikeinknelqlmkeqkelgtayvldihslndykishnernknvklqndimngnr |
| 159) | dknaldkinkklvelkikmdkitkrnsilrlkyklqvaygflmeeykgnikkfkdefdisk |
| | ekiksykskgekylevksekkyitkilnsiedihnitwlknqeennlfldyvltyillpfefr |
| | gdflgfvkkhyydiknvefldenndrltpeqlekmkndsffnkirlfeknskkydilkesi |
| | ltserigkyfsl1ntgakyfeyggeenrgifnkniiipifkyyqivlklyndvelamlltlses |
| | dekdinkikelvtlkekvspkkidyekkykfsvlldcfnriinlgkkdflaseevkevaktf |
| | tnlaylrnkichlnyskfiddlltidtnksttdsegkllindrirklikfirennqkmnisidyn |
| | yindyymkkekfifgqrkqaktiidsgkkankrnkaeellkmyrvkkeninliyelskkl |
| | neltkselflldkkllkdidftdvkiknksffelkndvkevanikqalqkhsseligiykkev |
| | imaikrsivskliydeekvlsiiiydktnkkyedflleirrerdinkfqflidekkeklgyekii |
| | etkekkkvvvkiqnnselvsepriiknkdkkkaktpeeisklgildltnhycfnlkitl |
| Fusobacterium | menkgnnkkidfdenynilvaqikeyftkeienynnridniidkkellkysekkeesekn |
| ulcerans | kkleelnklksqklkiltdeeikadvikiikifsdlrhslmhyeykyfenlfenkkneelael |
| ATCC | lnlnlfknitllrqmkienktnylegreefniigknikakevlghynllaeqkngfnnfinsf |
| 49185 | fvqdgtenlefkklidehfvnakkrlernikkskklekelekmeqhyqrincayvwdiht |
| cont2.38 | sttykklynkrkslieeynkqineikdkevitainvellrikkemeeitksnslfrlkykmqi |
| (SEQ ID No. | ayafleiefggniakfkdefdcskmeevqkylkkgvkylkyykdkeaqknyefpfeeif |
| 160) | enkdthneewlentsennlfkfyiltylllpmefkgdflgvvkkhyydiknvdftdeseke |
| | lsqvqldkmigdsffhkirlfekntkryeiikysiltsdeikryffileldvpyfeyekgtdei |
| | gifnkniiltifkyyqiifrlyndleihglfnissdldkilrdlksygnkninfreflyvikqnn |
| | nssteeeyrkiwenleakylrlhlltpekeeiktktkeeleklneisnlrngichlnykeiieei |
| | lkteiseknkeatlnekirkvinfikeneldkvelgfnfindffmkkeqfmfgqikqvkeg |
| | nsdsittererkeknnkklketyelncdnlsefyetsnnlreranssslledsaflkkiglykv |
| | knnkvnskykdeekrienikrkllkdssdimgmykaevykklkeklilifkhdeekriy |
| | vtvydtskavpeniskeilvkrnnskeeyffednnkkyvteyytleitetnelkvipakkle |
| | gkefkteknkenklmlnnhycfnvkiiy |
| Anaerosalib | mksgrrekaksnkssivrviisnfddkqvkeikvlytkqggidvikfkstekdekgrmkf |
| acter sp. | nfdcaynrleeeefnsfggkgkqsffvttnedltelhvtkrhkttgeiikdytiqgkytpikq |
| ND1 | drtkvtvsitdnkdhfdsndlgdkirlsrsltqytnrilldadvmknyreivcsdsekvdeti |
| genome | nidsqeiykinrflsyrsnmiiyyqminnfllhydgeedkggndsinlineiwkyenkkn |
| assembly | dekekiiersyksieksinqyilnhntevesgdkekkidiseerikedlkktfilfsrlrhym |
| Anaerosalib | vhynykfyenlysgknfiiynkdksksrrfselldlnifkelskiklvknravsnyldkktti |
| acter | hvlnkninaiklldiyrdicetkngfnnfinnmmtisgeedkeykemvtkhfnenmnkl |
| massiliensis | siylenfkkhsdflannkkketynllkqeldeqkklrlwfnapyvydihsskkykelyve |
| ND1 (SEQ | rkkyvdihsklieaginndnkkklneinvklcelntemkemtklnskyrlqyklqlafgfi |
| ID No. 161) | leefnldidkfvsafdkdnnitiskfmekretylsksldrrdnrfkklikdykfrdtedifcsd |
| | rennlvklyilmyillpveirgdflgfvkknyydlkhvdfidkrnndnkdtffhdlrlfekn |
| | vkrlevtsyslsdgflgkksrekfgkelekfiyknvsialptnidikefnkslvlpmmkny |
| | qiifkllndieisalfliakkegnegsitfkkvidkvrkedmngninfsqvmkmalnekv |
| | ncqirnsiahinmkqlyiepiniyinnnqnkktiseqmeeiidicitkgltgkelnkniind |
| | yymkkeklvfnlklrkrnnlvsidaqqknmkeksilnkydlnykdenlnikeiilkvndl |
| | nnkqkllkettegesnyknalskdilllngiirkninfkikemilgiiqqneyryvniniydk |
| | irkedhnidlkinnkyieiscyenksnestderinfkikymdlkvknellvpscyediyik |
| | kkidleiryienckvvyidiyykkyninlefdgktlfvkfnkdvkknnqkvnlesnyiqni |
| | kfivs |

TABLE 4B

| Name | sequence |
|---|---|
| EHO19 | mtekksiifknkssveivkkdifsqtpdnmirnykitlkiseknprvveaeiedlmnstilkdgrrsarreksmte |
| 081 | rklieekvaenysllancpmeevdsikiykikrfltyrsnmllyfasinsflcegikgkdneteeiwhlkdndyrke |
| (SEQ | kykenfknkliqstenynsslknqieekekllrkeskkgafyrtiikklqqerikelseksltedcekiiklyselrhpl |
| ID No. | mhydyqyfenlfenkenseltknlnldifkslplyrkmklnnkynyledndtlfylqktkkaktlyqiydalceqk |
| 762) | ngfnkfindffysdgeentyfkqiinekfqsemeflekrisesekkneklkkkfdsmkahfhninsedtkeayf |
| | wdihsssnyktkynerknlyneytellgsskekkllreeitqinrkllklkqemeeitkknslfrleykmkiafgflf |
| | cefdgniskfkdefdasnqekiiqyhkngekyltyflkeeekekfnlekmqkiiqkteeedwllpetknnlfkly |
| | lltylllpyelkgdflgfykkhyydiknydfmdenqnniqvsqtvekqedyfyhkirlfekntkkyeivkysivpn |
| | eklkqyfedlgidikyltgsvesgekwlgenlgidikyltveqksevseekikkfl |
| WP_0 | mekdkkgekidisqemieedlrkililfsrlrhsrrwhydyefyqalysgkdfyisdknnlenrmisql1dlnifkel |
| 94899 | skyklikdkaisnyldknttihylgqdikairlldiyrdicgskngfnkfintmitisgeedreykekviehfnkkme |
| 336 | nlstyleklekqdnakrnnkrvynllkqklieqqklkewfggpyvydihsskrykelyierkklydrhsklfeegld |
| (SEQ | eknkkeltkindelsklnsemkemtklnskyrlqyklq1afgfileefdlnidtfinnfdkdkdliisnfmkkrdiy1 |
| ID No. | nrvldrgdnrlkniikeykfrdtedifcndrdnnlyklyilmyillpveirgdflgfvkknyydmkhydfidkkdke |
| 763) | dkdtffhdlrlfeknirkleitdyslssgflskehkydiekkindfinrngamklpeditieefnkslilpimknyqin |
| | fkllndieisalfkiakdrsitfkqaideiknedikknskkndknnhkdkninftqlmkralhekipykagmyqir |
| | nnishidmeqlyidplnsymnsnknnitiseqiekiichicytggvtgkelnnniindyymkkeklvfnlklrkqn |
| | divsiesqeknkreefvfkkygldykdgeiniieviqkynslqeelrniketskeklknketlfrdislingtirkninf |
| | kikernyldivrmdeirhinihiyykgenytrsniikfkyaidgenkkyylkqheindinlelkdkfvtlicnmdkh |
| | pnknkqtinlesnyiqnvkfiip |
| WP_0 | menkgnnkkidfdenynilvaqikeyftkeienynnridniidkkellkysekkeeseknkkleelnklksqklk |
| 40490 | iltdeeikadvikiikifsdlrhslmhyeykyfenlfenkkneelaellnlnlfknltllrqmkienktnylegreefni |
| 876 | igknikakevlghynllaeqkngfnnfinsffvqdgtenlefkklidehlynakkrlernikkskklekelekmeq |
| (SEQ | hyqrlncayvwdihtsttykklynkrkslieeynkqineikdkevitainvellrikkemeeitksnslfrlkykmq |
| ID No. | iayafleiefggniakfkdefdcskmeevqkylkkgykylkyykdkeaqknyefpfeeifenkdthneewlen |
| 764) | tsennlfkfyiltylllpmefkgdflgyvkkhyydiknyciftdesekelsqvqldkmigdsffhkirlfekntkryeii |
| | kysiltsdeikryfrlleldvpyfeyekgtdeigifnkniiltifkyyqiifrlyndleihglfnissdldkilrdlksygnkn |
| | infreflyvikqnnnssteeeyrkiwenleakylrlhlltpekeeiktktkeeleklneisnlrngichlnykeiieeil |
| | kteiseknkeatlnekirkvinfikeneldkvelgnfindffmkkeqfmfgqikqvkegnsdsittererkekn |
| | nkklketyelncdnlsefyetsnnlreranssslledsaflkkiglykyknnkynskykdeekrienikrkllkdssd |
| | imgmykaevykklkeklilifkhdeeknyvtyydtskaypeniskeilykrnnskeeyffednnkkyyteyytl |
| | eitetnelkvipakklegkefkteknkenklmlnnhycfnvkiiy |
| WP_0 | meeikhkknkssiirvivsnydmtgikeikvlyqkqggvdtfnlktiinlesgnleiisckpkerekyryefnckte |
| 47396 | intisitkkdkvlkkeirkyslelyfknekkdtvvakvtdllkapdkiegernhlrklsssterkllsktlcknyseiskt |
| 607 | pieeidsikiykikrflnyrsnfliyfalindflcagykeddinevwliqdkehtaflenriekitdyifdklskdienk |
| (SEQ | knqfekrikkyktsleelktetleknktfyidsiktkitnlenkitelslynskeslkedlikiisiftnlrhslmhydyks |
| ID No. | fenlfenieneelknlldlnlfksirmsdefktknrtnyldgtesftivkkhqnlkklytyynnlcdkkngfntfinsf |
| 765) | fvtdgientdfknliilhfekemeeykksieyykikisneknkskkeklkekidllqselinmrehknllkqiyffdi |
| | hnsikykelyserknlieqynlqingykdvtainhintkllslknkmdkitkqnslyrlkyklkiaysflmiefdgdy |
| | skfknnfdptnlekrveyldkkeeylnytapknkfnfakleeelqkiqstsemgadylrwspennlfkfyiltyi |
| | mlpvefkgdflgfvknhyyniknydfmdeslldenevdsnklnekienlkdssffnkirlfeknikkyeivkysv |
| | stgenmkeyfkqlnldipyldykstdeigifnknmilpifkyyqnvfklcndieihallalankkqqnleyaiyccs |
| | kknslnynellktfnrktyqn1sfirnkiahlnykelfsdlfnneldlntkvrcliefsqnnkfdqidlgmnfindyy |
| | mkktrfifnqrrlrdlnvpskekiidgkrkqqndsnnellkkyglsrtnikdifnkawy |
| WP_0 | mkyryrkqaqldtfiikteivnndifiksiiekarekyrysflfdgeekyhfknkssveivkndifsqtpdnmirny |
| 35935 | kitlkiseknprvveaeiedlmnstilkdgrrsarreksmterklieekvaenysllancpieevdsikiykikrflty |
| 671 | rsnmllyfasinsflcegikgkdneteeiwhlkdndyrkekykenfknkliqstenynsslknqieekeklsskef |
| (SEQ | kkgafyrtiikklqqerikelseksltedcekiiklyselrhplmhydyqyfenlfenkenseltknlnldifkslplyr |
| ID No. | kmklnnkynyledndtlfylqktkkaktlyqiydalceqkngfnkfindffysdgeentyfkqiinekfqsemef |
| 766) | lekrisesekkneklkkkldsmkahfrninsedtkeayfwdihssrnyktkynerknlyneytkllgsskekkllr |
| | eeitkinrqllklkqemeeitkknslfrleykmkiafgflfcefdgniskfkdefdasnqekiiqyhkngekyltsfl |
| | keeekekfnlekmqkiiqkteeedwllpetknnlfkfylltylllpyelkgdflgfvkkhyydiknydfmdenqn |
| | niqvsqtvekqedyfyhkirlfekntkkyeivkysivpneklkqyfedlgidikyltgsvesgekwlgenlgidiky |
| | ltveqksevseeknkkvslknngmfnktillfvfkyyqiafklfridielyslfflreksekpfevfleelkdkmigkql |
| | nfgqllyvvyevlyknkdldkilskkidyrkdksfspeiaylrnflshlnyskfldnfmkintnksdenkevlipsiki |
| | qkmiqfiekcnlqnqidfdfrifyndlymrkekmffiqlkqifpdinstekqkksekeeilrkryhlinkkneqik |
| | deheaqsqlyekilslqkifscdknnfyrrlkeekllflekqgkkkismkeikdkiasdisdllgilkkeitrdikdklt |
| | ekfryceekllnisfynhqdkkkeegirvflirdknsdnfkfesilddgsnkifiskngkeitiqccdkvletlmiek |
| | ntlkissngkiisliphysysidvky |
| WP_0 | mekfrrqnrssiikiiisnydtkgikelkyryrkqaqldtfiikteivnndifiksiiekarekyrysflfdgeekyhfk |
| 35906 | nkssveivkkdifsqtpdnmirnykitlkiseknprvveaeiedlmnstilkdgrrsarreksmterklieekvae |
| 563 | nysllancpmeevdsikiykikrfltyrsnmllyfasinsflcegikgkdneteeiwhlkdndyrkekykenfknk |
| (SEQ | liqstenynsslknqieekekllrkeskkgafyrtiikklqqerikelseksltedcekiiklyselrhplmhydyqyf |
| ID No. | enlfenkenseltknlnldifkslplyrkmklnnkynyledndtlfylqktkkaktlyqiydalceqkngfnkfind |
| 767) | ffysdgeentyfkqiinekfqseieflekrisesekkneklkkkldsmkahfrninsedtkeayfwdihssrnykt |
| | kynerknlyneytellgsskekkllreeitkinrql1klkqemeeitkknslfrleykmkmafgflfcefdgnisrfk |
| | defdasnqekiiqyhkngekyltyflkeeekekfnlkklqetiqktgeenwllpqnknnlfkfylltylllpyelkg |
| | dflgfykkhyydiknydfmdenqsskiieskeddlyhkirlfekntkkyeivkysivpdkklkqyfkdlgidtkyli |
| | ldqksevsgeknkkvslknngmfnktillfvfkyyqiafklindielyslfflreksgkpfevflkelkdkmigkqlnf |
| | gqllyvvyevlyknkdlseilseridyrkdmcfsaeiadlrnflshnyskfldnfmkintnksdenkevlipsikiq |
| | kmikfieecnlqsqidfdfrifyndlymrkekmffiqlkqifpdinstekqkmnekeeilrnryhltdkkneqik |
| | deheaqsqlyekilslqkiyssdknnfygrlkeekllflekqekkklsmeeikdkiagdisdllgilkkeitrdikdkl |
| | tekfryceekllnlsfynhqdkkkeesirvflirdknsdnfkfesilddgsnkifiskngkeitiqccdkvletliiekn |
| | tlkissngkiisliphysysidvky |
| WP_0 | mksgrrekaksnkssivrviisnfddkqykeikvlytkqggidvikfkstekdekgrmkfnfdcaynrleeeefn |
| 42678 | sfggkgkqsffyttnedltelhytkrhkttgeiikdytiqgkytpikqdrtkytysitdnkdhfdsndlgdkirlsrsl |
| 931 | tqytnrilldadvmknyreivcsdsekvdetinidsqeiykinrflsyrsnmiiyyqminnfllhydgeedkggn |
| (SEQ | dsinlineiwkyenkkndekekiiersyksieksinqyilnhntevesgdkekkidiseerikedlkktfilfsrlrh |
| ID No. | ymvhynyklyenlysgknfilynkdksksrrfselldlnifkelskiklyknraysnyldkkttihylnkninaiklldi |
| 768) | yrdicetkngfnnfinnmmtisgeedkeykernytkhfnenmnklsiylenfkkhsdfktnnkkketynllkq |
| | eldeqkklrlwfnapyvydihsskkykelyverkkyydihsklieaginndnkkklneinvklcelntemkemt |
| | klnskyrlqyklq1afgfileefnldidkfvsafdkdnnltiskfmekretylsksldrrdnrfkklikdykfrdtedif |
| | csdrennlyklyilmyillpveirgdflgfvkknyydlkhvdfidkrnndnkdtffhdlrlfeknykrlevtsyslsdg |
| | flgkksrekfgkelekfiykrwsialptnidikefnkslvlpmmknyqiifkllndieisalfliakkegnegsitfkkv |
| | idkvrkedmngninfsqvmkmalnekyncqirnsiahinmkqlyiepiniyinnnqnkktiseqmeeiidici |
| | tkgltgkelnkniindyymkkeklvfn;klrkrnnlysidaqqknmkeksilnkydlnykdenlnikeiilkyndl |
| | nnkqkllkettegesnyknalskdilllngiirkninfkikemilgiiqqneyryvniniydkirkedhnidlkinnk |
| | yieiscyenksnestderinfkikymdlkyknellypscyediyikkkidleiryienckvvyidiyykkyninlefd |
| | gktlfvkfnkdvkknnqkvnlesnyiqnikfivs |
| WP_0 | mekfrrqnrnsiikiiisnydtkgikelkyryrkqaqldtfiikteivnndifiksiiekarekyrysflfdgeekyhfk |
| 62627 | nkssveivkkdifsqtpdnmirnykitlkiseknprvveaeiedlmnstilkdgrrsarreksvterklieekvae |
| 846 | nysllancpmeevdsikiykikrfltyrsnmllyfasinsflcegikgkeneteeiwhlkdndyrkekykenfknk |
| (SEQ | liqstenynsslknqieekekllrkeskkgafyrtiikklqqerikelseksltedcekiiklysklrhslmhydyqyf |
| ID No. | enlfenketpelkdkldlhlfkslplirkmklnnkynyledgdtlfylqktkkaktlyqiydalceqkngfnkfindf |
| 769 | fvsdgeentyfkqiinekfqsemeflgkriseseeknpklkkkfdsmkahfhninsedtkeayfwdihsssny |
| | ktkynerknlyneytellgsskekkllreeitqinrkllklkqemeeitkknslfrleykmkmafgflfcefdgnisr |
| | fkdefdasnqekiiqyhkngekyltyflkeeekekfnlkklqetiqktgkenwllpqnknnlfkfylltylllpyelk |
| | gdflgfykkhyydiknydfmdenqsskiieskeddlyhkirlfekntkkyeivkysivpdeklkqyfkdlgidtky |
| | lileqksevsgeknkkvslknngmfnktillfvfkyyqiafklindielyslfflreksgkpfevflkelkdkmigkql |
| | nfgqllyviyevlyknkdlseilseridyrkdmcfsaeiadlrnflshlnyskfldnfmkintnksdenkevlipsiki |
| | qkmikfieecnlqsqidfdfrifyndlymrkekmffiqlkqifpdinstekqkmnekeeilrnryhltdkkneqi |
| | kdeheaqsqlyekilslqkiyssdknnfygrlkeekllflgkqgkkklsmeeikdkiagdisdllgilkkeitrdikdk |
| | ltekfryceekllnlsfynhqdkkkeesirvflirdknsdnfkfesilddgsnkifiskngkeitiqccdkvletlmie |
| | kntlkissngkiislvphysysidvky |
| WP_0 | mekfrrqnrnsiikiiisnydtkgikelkyryrkqaqldtfiikteivnndifiksiiekarekyrysflfdgeekyhfk |
| 05959 | nkssveivkkdifsqtpdnmirnykitlkiseknprvveaeiedlmnstilkdgrrsarreksmterklieekvak |
| 231 | nysllancpmeevdsikiykikrfltyrsnmllyfasinsflcegikgkdneteeiwhlkdndyrkekvrenfknk |
| (SEQ | liqstenynsslknqieekekllrkefkkgafyrtiikklqqerikelseksltedcekiiklysklrhslmhydyqyf |
| ID No. | enlfenkknddlmkdlnldlfkslplirkmklnnkynyledgdtlfylqktkkaktlyqiydalceqkngfnkfin |
| 770) | dffvsdgeentvfkqiinekfqsemeflekrisesekkneklkkkldsmkahfrninsedtkeayfwdihssrn |
| | yktkynerknlyneytellgsskekkllreeitkinrql1klkqemeeitkknslfrleykmkiafgflfcefdgnisk |
| | fkdefdasnqekiiqyhkngekyltsflkeeekekfnlekmqkiiqkteeedwllpetknnlfkfylltylllpyel |
| | kgdflgfvkkhyydiknvdfidenqnniqvsqtvekqedyfyhkirlfekntkkyeivkysivpneklkqyfedl |
| | gidikyltveqksevseeknkkvslknngmfnktillfvfkyyqiafklindielyslfflreksgkpleifrkelesk |
| | mkdgylnfgqllyvvyevlyknkdldkilskkidyrkdksfspeiaylrnflshlnyskfldnfmkintnksdenk |
| | evlipsikiqkmiqfiekcnlqnqidfdfnfvndfymrkekmffiqlkqifpdinstekqkmnekeeilrnryhlt |
| | dkkneqikdeheaqsqlyekilslqkiyssdknnfygrlkeekllflekqgkkklsmeeikdkiagdisdllgilkk |
| | eitrdikdkltekfryceekllnlsfynhqdkkkeesirvflirdknsdnfkfesilddgsnkifiskngkeitiqccdk |
| | vletliiekntlkissngkiisliphysysidvky |
| WP_0 | mgkpnrssiikiiisnydnkgikevkvrynkqaqldtflikselkdgkfilysivdkarekyrysfeidktninkneil |
| 27128 | iikkdiysnkedkvirkyilsfevsekndrtivtkikdcletqkkekferentrrliseterkllseetqktyskiaccs |
| 616 | pedidsvkiykikrylayrsnmllffslindifvkgvvkdngeevgeiwriidskeidekktydllvenfkkrmsqe |
| (SEQ | finykqsienkiekntnkikeieqklkkekykkeinrlkkqlielnrendllekdkielsdeeirediekilkiysdlr |
| ID No. | hklmhynyqyfenlfenkkiskeknedvnltelldlnlfrylplyrqlklenktnylekedkitylgysdsaikyys |
| 771) | yynflceqkngfnnfinsffsndgeenksfkekinlslekeieimeketnekikeinknelqlmkeqkelgtayv |
| | ldihslndykishnernknvklqndimngnrdknaldkinkklvelkikmdkitkrnsilrlkyklqvaygflme |
| | eykgnikkfkdefdiskekiksykskgekylevksekkyitkilnsiedihnitwlknqeennlfklyvltyillpfef |
| | rgdflgfvkkhyydiknvefldenndrltpeqlekmkndsffnkirlfeknskkydilkesiltserigkyfsllntga |
| | kyfeyggeenrgifnkniiipifkyyqivlklyndvelamlltlsesdekdinkikelvtlkekvspkkidyekkykf |
| | svlldcfnriinlgkkdflaseevkevaktftnlaylrnkichlnyskfiddlltidtnksttdsegkllindrirklikfire |
| | nnqkmnisidynyindyymkkekfifgqrkqaktiidsgkkankrnkaeellkmyrvkkeninliyelskklne |
| | ltkselflldkkllkdidftdvkiknksffelkndykevanikqalqkhsseligiykkevimaikrsivskliydeekv |
| | lsiiiydktnkkyedflleirrerdinkfqflidekkeklgyekiietkekkkvvykiqnnselvsepriiknkdkkka |
| | ktpeeisklgildltnhycfnlkitl |
| WP_0 | mekfrrqnrnsiikiiisnydtkgikelkyryrkqaqldtfiikteivnndifiksiiekarekyrysflfdgeekyhfk |
| 62624 | nkssveivkkdifsqtpdnmirnykitlkiseknprvveaeiedlmnstilkdgrrsarreksmterklieekvak |
| 740 | nysllancpmeevdsikiykikrfltyrsnmllyfasinsflcegikgkdneteeiwhlkdndyrkekvrenfknk |
| (SEQ | liqstenynsslknqieekekllrkefkkgafyrtiikklqqerikelseksltedcekiiklysklrhslmhydyqyf |
| ID No. | enlfenkknddlmkdlnldlfkslplirkmklnnkvnyledgdtlfvlqktkkaktlyqiydalceqkngfnkfin |
| 772) | dffvsdgeentyfkqiinekfqsemeflekrisesekkneklkkkldsmkahfrninsedtkeayfwdihssrn |
| | yktkynerknlvneytellgsskekkllreeitkinrqllklkqemeeitkknslfrleykmkiafgflfcefdgnisk |
| | fkdefdasnqekiiqyhkngekyltsflkeeekekfnlekmqkiiqkteeedwllpetknnlfkfylltylllpyel |
| | kgdflgfvkkhyydiknvdfidenqnniqvsqtvekqedyfyhkirlfekntkkyeivkysivpneklkqyfedl |
| | gidikyltgsvesgekwlgenlgidikyltveqksevseeknkkvslknngmfnktillfvfkyyqiafklfndiely |
| | slfflreksgkpleifrkeleskmkdgylnfgqllyvvyevlvknkdldkilskkidyrkdksfspeiaylrnflshlny |
| | skfldnfmkintnksdenkevlipsikiqkmiqfiekcnlqnqidfdfnfvndlymrkekmffiqlkqifpdinist |
| | ekqkmnekeeilrnryhltdkkneqikdeheaqsqlyekilslqkiyssdknnfygrlkeekllflekqgkkkls |
| | meeikdkiagdisdllgilkkeitrdikdkltekfryceekllnlsfynhqdkkkeesirvflirdknsdnfkfesildd |
| | gsnkifiskngkeitiqccdkvletliiekntlkissngkiisliphysysidvky |
| WP_0 | menknkpnrgsivriiisnydmkgikelkyryrkqaqldtfilqttldksnnsilindfrykarekyrysftydgke |
| 96402 | kfsvpsnsiivtkidnaapekskeirkykitlgidekcktgsmitaaiedlleddrvregirnprrkaskterklites |
| 050 | ichnyaqitqcpveeidavkiykvkrflsyrsnmllffalindflcknlknekgekineiwemenkgnnkkidfd |
| SEQ ID | enynilvaqikeyftkeienynnridniidkkellkyseekeeseknkkleelnklesqklkiltdeeikadvikiiki |
| No. | fsdlrhslmhyeykyfenlfenkkneelaellnlnlfknltllrqmkienktnylegdekfnilgkdvraknalghy |
| 773 | dllveqkngfnnfinsffvqdgtenlefkkfidenfikaqkeleediknckesykklekklkenpkksedlekkle |
| | kkqkklkelkkelekmkqhykrlncayvwdihsstvykklynerknliekynkqlnglqdknaitginagllrik |
| | kemeeitksnslfrlkykmqiayaflemeyegniakfknefdcsktekiqewlekseeylnycmekeedgkn |
| | ykfhfkeiseikdthneewlentsennlfkfyiltylllpmefkgdflgvvkkhyydiknvdftdesekelsqeqi |
| | dkmigdsffhkirlfekntkryeiikysiltsdeikkyfellelkvpyleykgideigifnkniilpifkyyqiifrlyndle |
| | ihglfnvsfdinkilsdlksygneninfreflyvikqnnnssteeeyqkiwekleskylkeplltpekkeinkktek |
| | elkkldgisflrnkishleyekiiegvlktavngenkktsetnadkvflnekikkiinfikeneldkielgfnfindff |
| | mkkeqfmfgqikqvkegnsdsitterkrkeennkrlkityglnynnlskiyefsntlreivnsplflkdstllkkvdl |
| | skvmlkekpicslqyenntkleddikrillkdssdimgiykaevvkklkeklvlifkydeekkiyvtvydtskavp |
| | eniskeilykrnnskeeyffednkkkyttqyytleitkenelkvipakklegkefktekkeenklmlnnhycfnv |
| | kiiy |

[0762] In some embodiments, the Cas13 protein is a Cas13d protein. Yan et al. Molecular Cell, 70, 327-339 (2018).

[0763] In some embodiments, the components of the AD-functionalized CRISPR-Cas system may be delivered in various form, such as combinations of DNA/RNA or RNA/RNA or protein RNA. For example, the Cas13 protein may be delivered as a DNA-coding polynucleotide or an RNA-coding polynucleotide or as a protein. The guide may be delivered may be delivered as a DNA-coding polynucleotide or an RNA. All possible combinations are envisioned, including mixed forms of delivery.

### Delivery of Engineered Compositions

[0764] In some aspects, the invention provides methods comprising delivering one or more polynucleotides, such as or one or more vectors as described herein, one or more transcripts thereof, and/or one or proteins transcribed therefrom, to a host cell.

[0765] Vectors

[0766] In general, the term “vector” refers to a nucleic acid molecule capable of transporting another nucleic acid to which it has been linked. It is a replicon, such as a plasmid, phage, or cosmid, into which another DNA segment may be inserted so as to bring about the replication of the inserted segment. Generally, a vector is capable of replication when associated with the proper control elementsVectors include, but are not limited to, nucleic acid molecules that are single-stranded, double-stranded, or partially double-stranded; nucleic acid molecules that comprise one or more free ends, no free ends (e.g., circular); nucleic acid molecules that comprise DNA, RNA, or both; and other varieties of polynucleotides known in the art. One type of vector is a “plasmid,” which refers to a circular double stranded DNA loop into which additional DNA segments can be inserted, such as by standard molecular cloning techniques. Another type of vector is a viral vector, wherein virally-derived DNA or RNA sequences are present in the vector for packaging into a virus (e.g., retroviruses, replication defective retroviruses, adenoviruses, replication defective adenoviruses, and adeno-associated viruses). Viral vectors also include polynucleotides carried by a virus for transfection into a host cell. Certain vectors are capable of autonomous replication in a host cell into which they are introduced (e.g., bacterial vectors having a bacterial origin of replication and episomal mammalian vectors). Other vectors (e.g., non-episomal mammalian vectors) are integrated into the genome of a host cell upon introduction into the host cell, and thereby are replicated along with the host genome. Moreover, certain vectors are capable of directing the expression of genes to which they are operatively-linked. Such vectors are referred to herein as “expression vectors.” Vectors for and that result in expression in a eukaryotic cell can be referred to herein as “eukaryotic expression vectors.” Common expression vectors of utility in recombinant DNA techniques are often in the form of plasmids.

[0767] Recombinant expression vectors can comprise a nucleic acid of the invention in a form suitable for expression of the nucleic acid in a host cell, which means that the recombinant expression vectors include one or more regulatory elements, which may be selected on the basis of the host cells to be used for expression, that is operatively-linked to the nucleic acid sequence to be expressed. Within a recombinant expression vector, “operably linked” is intended to mean that the nucleotide sequence of interest is linked to the regulatory element(s) in a manner that allows for expression of the nucleotide sequence (e.g., in an in vitro transcription/translation system or in a host cell when the vector is introduced into the host cell). Advantageous vectors include lentiviruses and adeno-associated viruses, and types of such vectors can also be selected for targeting particular types of cells.

[0768] With regards to recombination and cloning methods, mention is made of U.S. patent application Ser. No. 10/815,730, published Sep. 2, 2004 as US 2004-0171156 A1, the contents of which are herein incorporated by reference in their entirety.

[0769] The term “regulatory element” is intended to include promoters, enhancers, internal ribosomal entry sites (IRES), and other expression control elements (e.g., transcription termination signals, such as polyadenylation signals and poly-U sequences). Such regulatory elements are described, for example, in Goeddel, GENE EXPRESSION TECHNOLOGY: METHODS IN ENZYMOLOGY 185, Academic Press, San Diego, Calif. (1990). Regulatory elements include those that direct constitutive expression of a nucleotide sequence in many types of host cell and those that direct expression of the nucleotide sequence only in certain host cells (e.g., tissue-specific regulatory sequences). A tissue-specific promoter may direct expression primarily in a desired tissue of interest, such as muscle, neuron, bone, skin, blood, specific organs (e.g., liver, pancreas), or particular cell types (e.g., lymphocytes). Regulatory elements may also direct expression in a temporal-dependent manner, such as in a cell-cycle dependent or developmental stage-dependent manner, which may or may not also be tissue or cell-type specific. In some embodiments, a vector comprises one or more pol III promoter (e.g., 1, 2, 3, 4, 5, or more pol III promoters), one or more pol II promoters (e.g., 1, 2, 3, 4, 5, or more pol II promoters), one or more pol I promoters (e.g., 1, 2, 3, 4, 5, or more pol I promoters), or combinations thereof. Examples of pol III promoters include, but are not limited to, U6 and H1 promoters. Examples of pol II promoters include, but are not limited to, the retroviral Rous sarcoma virus (RSV) LTR promoter (optionally with the RSV enhancer), the cytomegalovirus (CMV) promoter (optionally with the CMV enhancer) [see, e.g., Boshart et al, Cell, 41:521-530 (1985)], the SV40 promoter, the dihydrofolate reductase promoter, the β-actin promoter, the phosphoglycerol kinase (PGK) promoter, and the EF1α promoter. Also encompassed by the term “regulatory element” are enhancer elements, such as WPRE; CMV enhancers; the R-U5′ segment in LTR of HTLV-I (Mol. Cell. Biol., Vol. 8(1), p. 466-472, 1988); SV40 enhancer; and the intron sequence between exons 2 and 3 of rabbit β-globin (Proc. Natl. Acad. Sci. USA., Vol. 78(3), p. 1527-31, 1981). It will be appreciated by those skilled in the art that the design of the expression vector can depend on such factors as the choice of the host cell to be transformed, the level of expression desired, etc. A vector can be introduced into host cells to thereby produce transcripts, proteins, or peptides, including fusion proteins or peptides, encoded by nucleic acids as described herein (e.g., clustered regularly interspersed short palindromic repeats (CRISPR) transcripts, proteins, enzymes, mutant forms thereof, fusion proteins thereof, etc.). With regards to regulatory sequences, mention is made of U.S. patent application Ser. No. 10/491,026, the contents of which are incorporated by reference herein in their entirety. With regards to promoters, mention is made of PCT publication WO 2011/028929 and U.S. application Ser. No. 12/511,940, the contents of which are incorporated by reference herein in their entirety.

[0770] Advantageous vectors include lentiviruses and adeno-associated viruses, and types of such vectors can also be selected for targeting particular types of cells.

[0771] In particular embodiments, use is made of bicistronic vectors for the guide RNA and (optionally modified or mutated) the CRISPR-Cas protein fused to adenosine deaminase. Bicistronic expression vectors for guide RNA and (optionally modified or mutated) CRISPR-Cas protein fused to adenosine deaminase are preferred. In general and particularly in this embodiment, (optionally modified or mutated) CRISPR-Cas protein fused to adenosine deaminase is preferably driven by the CBh promoter. The RNA may preferably be driven by a Pol III promoter, such as a U6 promoter. Ideally the two are combined.

[0772] Vectors can be designed for expression of CRISPR transcripts (e.g. nucleic acid transcripts, proteins, or enzymes) in prokaryotic or eukaryotic cells. For example, CRISPR transcripts can be expressed in bacterial cells such as Escherichia coli, insect cells (using baculovirus expression vectors), yeast cells, or mammalian cells. Suitable host cells are discussed further in Goeddel, GENE EXPRESSION TECHNOLOGY: METHODS IN ENZYMOLOGY 185, Academic Press, San Diego, Calif. (1990). Alternatively, the recombinant expression vector can be transcribed and translated in vitro, for example using T7 promoter regulatory sequences and T7 polymerase.

[0773] Vectors may be introduced and propagated in a prokaryote or prokaryotic cell. In some embodiments, a prokaryote is used to amplify copies of a vector to be introduced into a eukaryotic cell or as an intermediate vector in the production of a vector to be introduced into a eukaryotic cell (e.g. amplifying a plasmid as part of a viral vector packaging system). In some embodiments, a prokaryote is used to amplify copies of a vector and express one or more nucleic acids, such as to provide a source of one or more proteins for delivery to a host cell or host organism. Expression of proteins in prokaryotes is most often carried out in Escherichia coli with vectors containing constitutive or inducible promoters directing the expression of either fusion or non-fusion proteins. Fusion vectors add a number of amino acids to a protein encoded therein, such as to the amino terminus of the recombinant protein. Such fusion vectors may serve one or more purposes, such as: (i) to increase expression of recombinant protein; (ii) to increase the solubility of the recombinant protein; and (iii) to aid in the purification of the recombinant protein by acting as a ligand in affinity purification. Often, in fusion expression vectors, a proteolytic cleavage site is introduced at the junction of the fusion moiety and the recombinant protein to enable separation of the recombinant protein from the fusion moiety subsequent to purification of the fusion protein. Such enzymes, and their cognate recognition sequences, include Factor Xa, thrombin and enterokinase. Example fusion expression vectors include pGEX (Pharmacia Biotech Inc; Smith and Johnson, 1988. Gene 67: 31-40), pMAL (New England Biolabs, Beverly, Mass.) and pRIT5 (Pharmacia, Piscataway, N.J.) that fuse glutathione S-transferase (GST), maltose E binding protein, or protein A, respectively, to the target recombinant protein. Examples of suitable inducible non-fusion E. coli expression vectors include pTrc (Amrann et al., (1988) Gene 69:301-315) and pET 11d (Studier et al., GENE EXPRESSION TECHNOLOGY: METHODS IN ENZYMOLOGY 185, Academic Press, San Diego, Calif. (1990) 60-89). In some embodiments, a vector is a yeast expression vector. Examples of vectors for expression in yeast Saccharomyces cerivisae include pYepSecl (Baldari, et al., 1987. EMBO J. 6: 229-234), pMFa (Kuijan and Herskowitz, 1982. Cell 30: 933-943), pJRY88 (Schultz et al., 1987. Gene 54: 113-123), pYES2 (Invitrogen Corporation, San Diego, Calif.), and picZ (InVitrogen Corp, San Diego, Calif.). In some embodiments, a vector drives protein expression in insect cells using baculovirus expression vectors. Baculovirus vectors available for expression of proteins in cultured insect cells (e.g., SF9 cells) include the pAc series (Smith, et al., 1983. Mol. Cell. Biol. 3: 2156-2165) and the pVL series (Lucklow and Summers, 1989. Virology 170: 31-39).

[0774] In some embodiments, a vector is capable of driving expression of one or more sequences in mammalian cells using a mammalian expression vector. Examples of mammalian expression vectors include pCDM8 (Seed, 1987. Nature 329: 840) and pMT2PC (Kaufman, et al., 1987. EMBO J. 6: 187-195). When used in mammalian cells, the expression vector's control functions are typically provided by one or more regulatory elements. For example, commonly used promoters are derived from polyoma, adenovirus 2, cytomegalovirus, simian virus 40, and others disclosed herein and known in the art. For other suitable expression systems for both prokaryotic and eukaryotic cells see, e.g., Chapters 16 and 17 of Sambrook, et al., MOLECULAR CLONING: A LABORATORY MANUAL. 2nd ed., Cold Spring Harbor Laboratory, Cold Spring Harbor Laboratory Press, Cold Spring Harbor, N.Y., 1989.

[0775] In some embodiments, the recombinant mammalian expression vector is capable of directing expression of the nucleic acid preferentially in a particular cell type (e.g., tissue-specific regulatory elements are used to express the nucleic acid). Tissue-specific regulatory elements are known in the art. Non-limiting examples of suitable tissue-specific promoters include the albumin promoter (liver-specific; Pinkert, et al., 1987. Genes Dev. 1: 268-277), lymphoid-specific promoters (Calame and Eaton, 1988. Adv. Immunol. 43: 235-275), in particular promoters of T cell receptors (Winoto and Baltimore, 1989. EMBO J. 8: 729-733) and immunoglobulins (Baneiji, et al., 1983. Cell 33: 729-740; Queen and Baltimore, 1983. Cell 33: 741-748), neuron-specific promoters (e.g., the neurofilament promoter; Byrne and Ruddle, 1989. Proc. Natl. Acad. Sci. USA 86: 5473-5477), pancreas-specific promoters (Edlund, et al., 1985. Science 230: 912-916), and mammary gland-specific promoters (e.g., milk whey promoter; U.S. Pat. No. 4,873,316 and European Application Publication No. 264,166). Developmentally-regulated promoters are also encompassed, e.g., the murine hox promoters (Kessel and Gruss, 1990. Science 249: 374-379) and the α-fetoprotein promoter (Campes and Tilghman, 1989. Genes Dev. 3: 537-546). With regards to these prokaryotic and eukaryotic vectors, mention is made of U.S. Pat. No. 6,750,059, the contents of which are incorporated by reference herein in their entirety. Other embodiments of the invention may relate to the use of viral vectors, with regards to which mention is made of U.S. patent application Ser. No. 13/092,085, the contents of which are incorporated by reference herein in their entirety. Tissue-specific regulatory elements are known in the art and in this regard, mention is made of U.S. Pat. No. 7,776,321, the contents of which are incorporated by reference herein in their entirety. In some embodiments, a regulatory element is operably linked to one or more elements of a CRISPR system so as to drive expression of the one or more elements of the CRISPR system.

[0776] In some embodiments, one or more vectors driving expression of one or more elements of a nucleic acid-targeting system are introduced into a host cell such that expression of the elements of the nucleic acid-targeting system direct formation of a nucleic acid-targeting complex at one or more target sites. For example, a nucleic acid-targeting effector enzyme and a nucleic acid-targeting guide RNA could each be operably linked to separate regulatory elements on separate vectors. RNA(s) of the nucleic acid-targeting system can be delivered to a transgenic nucleic acid-targeting effector protein animal or mammal, e.g., an animal or mammal that constitutively or inducibly or conditionally expresses nucleic acid-targeting effector protein; or an animal or mammal that is otherwise expressing nucleic acid-targeting effector proteins or has cells containing nucleic acid-targeting effector proteins, such as by way of prior administration thereto of a vector or vectors that code for and express in vivo nucleic acid-targeting effector proteins. Alternatively, two or more of the elements expressed from the same or different regulatory elements, may be combined in a single vector, with one or more additional vectors providing any components of the nucleic acid-targeting system not included in the first vector. nucleic acid-targeting system elements that are combined in a single vector may be arranged in any suitable orientation, such as one element located 5′ with respect to (“upstream” of) or 3′ with respect to (“downstream” of) a second element. The coding sequence of one element may be located on the same or opposite strand of the coding sequence of a second element, and oriented in the same or opposite direction. In some embodiments, a single promoter drives expression of a transcript encoding a nucleic acid-targeting effector protein and the nucleic acid-targeting guide RNA, embedded within one or more intron sequences (e.g., each in a different intron, two or more in at least one intron, or all in a single intron). In some embodiments, the nucleic acid-targeting effector protein and the nucleic acid-targeting guide RNA may be operably linked to and expressed from the same promoter. Delivery vehicles, vectors, particles, nanoparticles, formulations and components thereof for expression of one or more elements of a nucleic acid-targeting system are as used in the foregoing documents, such as WO 2014/093622 (PCT/US2013/074667). In some embodiments, a vector comprises one or more insertion sites, such as a restriction endonuclease recognition sequence (also referred to as a “cloning site”). In some embodiments, one or more insertion sites (e.g., about or more than about 1, 2, 3, 4, 5, 6, 7, 8, 9, 10, or more insertion sites) are located upstream and/or downstream of one or more sequence elements of one or more vectors. When multiple different guide sequences are used, a single expression construct may be used to target nucleic acid-targeting activity to multiple different, corresponding target sequences within a cell. For example, a single vector may comprise about or more than about 1, 2, 3, 4, 5, 6, 7, 8, 9, 10, 15, 20, or more guide sequences. In some embodiments, about or more than about 1, 2, 3, 4, 5, 6, 7, 8, 9, 10, or more such guide-sequence-containing vectors may be provided, and optionally delivered to a cell. In some embodiments, a vector comprises a regulatory element operably linked to an enzyme-coding sequence encoding a a nucleic acid-targeting effector protein. Nucleic acid-targeting effector protein or nucleic acid-targeting guide RNA or RNA(s) can be delivered separately; and advantageously at least one of these is delivered via a particle complex. nucleic acid-targeting effector protein mRNA can be delivered prior to the nucleic acid-targeting guide RNA to give time for nucleic acid-targeting effector protein to be expressed. Nucleic acid-targeting effector protein mRNA might be administered 1-12 hours (preferably around 2-6 hours) prior to the administration of nucleic acid-targeting guide RNA. Alternatively, nucleic acid-targeting effector protein mRNA and nucleic acid-targeting guide RNA can be administered together. Advantageously, a second booster dose of guide RNA can be administered 1-12 hours (preferably around 2-6 hours) after the initial administration of nucleic acid-targeting effector protein mRNA+guide RNA. Additional administrations of nucleic acid-targeting effector protein mRNA and/or guide RNA might be useful to achieve the most efficient levels of genome modification.

[0777] Conventional viral and non-viral based gene transfer methods can be used to introduce nucleic acids in mammalian cells or target tissues. Such methods can be used to administer nucleic acids encoding components of a nucleic acid-targeting system to cells in culture, or in a host organism. Non-viral vector delivery systems include DNA plasmids, RNA (e.g. a transcript of a vector described herein), naked nucleic acid, and nucleic acid complexed with a delivery vehicle, such as a liposome. Viral vector delivery systems include DNA and RNA viruses, which have either episomal or integrated genomes after delivery to the cell. For a review of gene therapy procedures, see Anderson, Science 256:808-813 (1992); Nabel & Felgner, TIBTECH 11:211-217 (1993); Mitani & Caskey, TIBTECH 11:162-166 (1993); Dillon, TIBTECH 11:167-175 (1993); Miller, Nature 357:455-460 (1992); Van Brunt, Biotechnology 6(10):1149-1154 (1988); Vigne, Restorative Neurology and Neuroscience 8:35-36 (1995); Kremer & Perricaudet, British Medical Bulletin 51(1):31-44 (1995); Haddada et al., in Current Topics in Microbiology and Immunology, Doerfler and Böhm (eds) (1995); and Yu et al., Gene Therapy 1:13-26 (1994).

[0778] Methods of non-viral delivery of nucleic acids include lipofection, nucleofection, microinjection, biolistics, virosomes, liposomes, immunoliposomes, polycation or lipid:nucleic acid conjugates, naked DNA, artificial virions, and agent-enhanced uptake of DNA. Lipofection is described in e.g., U.S. Pat. Nos. 5,049,386, 4,946,787; and 4,897,355) and lipofection reagents are sold commercially (e.g., Transfectam™ and Lipofectin™) Cationic and neutral lipids that are suitable for efficient receptor-recognition lipofection of polynucleotides include those of Felgner, WO 91/17424; WO 91/16024. Delivery can be to cells (e.g. in vitro or ex vivo administration) or target tissues (e.g. in vivo administration).

[0779] Plasmid delivery involves the cloning of a guide RNA into a CRISPR-Cas protein expressing plasmid and transfecting the DNA in cell culture. Plasmid backbones are available commercially and no specific equipment is required. They have the advantage of being modular, capable of carrying different sizes of CRISPR-Cas coding sequences (including those encoding larger sized proteins) as well as selection markers. Both an advantage of plasmids is that they can ensure transient, but sustained expression. However, delivery of plasmids is not straightforward such that in vivo efficiency is often low. The sustained expression can also be disadvantageous in that it can increase off-target editing. In addition excess build-up of the CRISPR-Cas protein can be toxic to the cells. Finally, plasmids always hold the risk of random integration of the dsDNA in the host genome, more particularly in view of the double-stranded breaks being generated (on and off-target).

[0780] The preparation of lipid:nucleic acid complexes, including targeted liposomes such as immunolipid complexes, is well known to one of skill in the art (see, e.g., Crystal, Science 270:404-410 (1995); Blaese et al., Cancer Gene Ther. 2:291-297 (1995); Behr et al., Bioconjugate Chem. 5:382-389 (1994); Remy et al., Bioconjugate Chem. 5:647-654 (1994); Gao et al., Gene Therapy 2:710-722 (1995); Ahmad et al., Cancer Res. 52:4817-4820 (1992); U.S. Pat. Nos. 4,186,183, 4,217,344, 4,235,871, 4,261,975, 4,485,054, 4,501,728, 4,774,085, 4,837,028, and 4,946,787). This is discussed more in detail below.

[0781] The use of RNA or DNA viral based systems for the delivery of nucleic acids takes advantage of highly evolved processes for targeting a virus to specific cells in the body and trafficking the viral payload to the nucleus. Viral vectors can be administered directly to patients (in vivo) or they can be used to treat cells in vitro, and the modified cells may optionally be administered to patients (ex vivo). Conventional viral based systems could include retroviral, lentivirus, adenoviral, adeno-associated and herpes simplex virus vectors for gene transfer. Integration in the host genome is possible with the retrovirus, lentivirus, and adeno-associated virus gene transfer methods, often resulting in long term expression of the inserted transgene. Additionally, high transduction efficiencies have been observed in many different cell types and target tissues.

[0782] The tropism of a retrovirus can be altered by incorporating foreign envelope proteins, expanding the potential target population of target cells. Lentiviral vectors are retroviral vectors that are able to transduce or infect non-dividing cells and typically produce high viral titers. Selection of a retroviral gene transfer system would therefore depend on the target tissue. Retroviral vectors are comprised of cis-acting long terminal repeats with packaging capacity for up to 6-10 kb of foreign sequence. The minimum cis-acting LTRs are sufficient for replication and packaging of the vectors, which are then used to integrate the therapeutic gene into the target cell to provide permanent transgene expression. Widely used retroviral vectors include those based upon murine leukemia virus (MuLV), gibbon ape leukemia virus (GaLV), Simian Immuno deficiency virus (SIV), human immuno deficiency virus (HIV), and combinations thereof (see, e.g., Buchscher et al., J. Virol. 66:2731-2739 (1992); Johann et al., J. Virol. 66:1635-1640 (1992); Sommnerfelt et al., Virol. 176:58-59 (1990); Wilson et al., J. Virol. 63:2374-2378 (1989); Miller et al., J. Virol. 65:2220-2224 (1991); PCT/US94/05700).

[0783] In applications where transient expression is preferred, adenoviral based systems may be used. Adenoviral based vectors are capable of very high transduction efficiency in many cell types and do not require cell division. With such vectors, high titer and levels of expression have been obtained. This vector can be produced in large quantities in a relatively simple system. Adeno-associated virus (“AAV”) vectors may also be used to transduce cells with target nucleic acids, e.g., in the in vitro production of nucleic acids and peptides, and for in vivo and ex vivo gene therapy procedures (see, e.g., West et al., Virology 160:38-47 (1987); U.S. Pat. No. 4,797,368; WO 93/24641; Kotin, Human Gene Therapy 5:793-801 (1994); Muzyczka, J. Clin. Invest. 94:1351 (1994). Construction of recombinant AAV vectors are described in a number of publications, including U.S. Pat. No. 5,173,414; Tratschin et al., Mol. Cell. Biol. 5:3251-3260 (1985); Tratschin, et al., Mol. Cell. Biol. 4:2072-2081 (1984); Hermonat & Muzyczka, PNAS 81:6466-6470 (1984); and Samulski et al., J. Virol. 63:03822-3828 (1989).

[0784] The invention provides AAV that contains or consists essentially of an exogenous nucleic acid molecule encoding a CRISPR system, e.g., a plurality of cassettes comprising or consisting a first cassette comprising or consisting essentially of a promoter, a nucleic acid molecule encoding a CRISPR-associated (Cas) protein (putative nuclease or helicase proteins), e.g., Cas13 and a terminator, andone or more, advantageously up to the packaging size limit of the vector, e.g., in total (including the first cassette) five, cassettes comprising or consisting essentially of a promoter, nucleic acid molecule encoding guide RNA (gRNA) and a terminator (e.g., each cassette schematically represented as Promoter-gRNAl-terminator, Promoter-gRNA2-terminator . . . Promoter-gRNA(N)-terminator, where N is a number that can be inserted that is at an upper limit of the packaging size limit of the vector), or two or more individual rAAVs, each containing one or more than one cassette of a CRISPR system, e.g., a first rAAV containing the first cassette comprising or consisting essentially of a promoter, a nucleic acid molecule encoding Cas, e.g., Cas (Cas13) and a terminator, and a second rAAV containing one or more cassettes each comprising or consisting essentially of a promoter, nucleic acid molecule encoding guide RNA (gRNA) and a terminator (e.g., each cassette schematically represented as Promoter-gRNAl-terminator, Promoter-gRNA2-terminator . . . Promoter-gRNA(N)-terminator, where N is a number that can be inserted that is at an upper limit of the packaging size limit of the vector). Alternatively, because Cas13 can process its own crRNA/gRNA, a single crRNA/gRNA array can be used for multiplex gene editing. Hence, instead of including multiple cassettes to deliver the gRNAs, the rAAV may contain a single cassette comprising or consisting essentially of a promoter, a plurality of crRNA/gRNA, and a terminator (e.g., schematically represented as Promoter-gRNAl-gRNA2 . . . gRNA(N)-terminator, where N is a number that can be inserted that is at an upper limit of the packaging size limit of the vector). See Zetsche et al Nature Biotechnology 35, 31-34 (2017), which is incorporated herein by reference in its entirety. As rAAV is a DNA virus, the nucleic acid molecules in the herein discussion concerning AAV or rAAV are advantageously DNA. The promoter is in some embodiments advantageously human Synapsin I promoter (hSyn). Additional methods for the delivery of nucleic acids to cells are known to those skilled in the art. See, for example, US20030087817, incorporated herein by reference.

[0785] In another embodiment, Cocal vesiculovirus envelope pseudotyped retroviral vector particles are contemplated (see, e.g., US Patent Publication No. 20120164118 assigned to the Fred Hutchinson Cancer Research Center). Cocal virus is in the Vesiculovirus genus, and is a causative agent of vesicular stomatitis in mammals. Cocal virus was originally isolated from mites in Trinidad (Jonkers et al., Am. J. Vet. Res. 25:236-242 (1964)), and infections have been identified in Trinidad, Brazil, and Argentina from insects, cattle, and horses. Many of the vesiculoviruses that infect mammals have been isolated from naturally infected arthropods, suggesting that they are vector-borne. Antibodies to vesiculoviruses are common among people living in rural areas where the viruses are endemic and laboratory-acquired; infections in humans usually result in influenza-like symptoms. The Cocal virus envelope glycoprotein shares 71.5% identity at the amino acid level with VSV-G Indiana, and phylogenetic comparison of the envelope gene of vesiculoviruses shows that Cocal virus is serologically distinct from, but most closely related to, VSV-G Indiana strains among the vesiculoviruses. Jonkers et al., Am. J. Vet. Res. 25:236-242 (1964) and Travassos da Rosa et al., Am. J. Tropical Med. & Hygiene 33:999-1006 (1984). The Cocal vesiculovirus envelope pseudotyped retroviral vector particles may include for example, lentiviral, alpharetroviral, betaretroviral, gammaretroviral, deltaretroviral, and epsilonretroviral vector particles that may comprise retroviral Gag, Pol, and/or one or more accessory protein(s) and a Cocal vesiculovirus envelope protein. Within certain aspects of these embodiments, the Gag, Pol, and accessory proteins are lentiviral and/or gammaretroviral.

[0786] In some embodiments, a host cell is transiently or non-transiently transfected with one or more vectors described herein. In some embodiments, a cell is transfected as it naturally occurs in a subject optionally to be reintroduced therein. In some embodiments, a cell that is transfected is taken from a subject. In some embodiments, the cell is derived from cells taken from a subject, such as a cell line. A wide variety of cell lines for tissue culture are known in the art. Examples of cell lines include, but are not limited to, C8161, CCRF-CEM, MOLT, mIMCD-3, NHDF, HeLa-S3, Huh1, Huh4, Huh7, HUVEC, HASMC, HEKn, HEKa, MiaPaCell, Panc1, PC-3, TF1, CTLL-2, C1R, Rat6, CV1, RPTE, A10, T24, J82, A375, ARH-77, Calu1, SW480, SW620, SKOV3, SK-UT, CaCo2, P388D1, SEM-K2, WEHI-231, HB56, TI1B55, Jurkat, J45.01, LRMB, Bcl-1, BC-3, IC21, DLD2, Raw264.7, NRK, NRK-52E, MRC5, MEF, Hep G2, HeLa B, HeLa T4, COS, COS-1, COS-6, COS-M6A, BS-C-1 monkey kidney epithelial, BALB/3T3 mouse embryo fibroblast, 3T3 Swiss, 3T3-L1, 132-d5 human fetal fibroblasts; 10.1 mouse fibroblasts, 293-T, 3T3, 721, 9L, A2780, A2780ADR, A2780cis, A172, A20, A253, A431, A-549, ALC, B16, B35, BCP-1 cells, BEAS-2B, bEnd.3, BHK-21, BR 293, BxPC3, C3H-10T1/2, C6/36, Cal-27, CHO, CHO-7, CHO-IR, CHO-K1, CHO-K2, CHO-T, CHO Dhfr −/−, COR-L23, COR-L23/CPR, COR-L23/5010, COR-L23/R23, COS-7, COV-434, CML T1, CMT, CT26, D17, DH82, DU145, DuCaP, EL4, EM2, EM3, EMT6/AR1, EMT6/AR10.0, FM3, H1299, H69, HB54, HB55, HCA2, HEK-293, HeLa, Hepalclc7, HL-60, HMEC, HT-29, Jurkat, JY cells, K562 cells, Ku812, KCL22, KG1, KYO1, LNCap, Ma-Mel 1-48, MC-38, MCF-7, MCF-10A, MDA-MB-231, MDA-MB-468, MDA-MB-435, MDCK II, MDCK II, MOR/0.2R, MONO-MAC 6, MTD-1A, MyEnd, NCI-H69/CPR, NCI-H69/LX10, NCI-H69/LX20, NCI-H69/LX4, NIH-3T3, NALM-1, NW-145, OPCN/OPCT cell lines, Peer, PNT-1A/PNT 2, RenCa, RIN-5F, RMA/RMAS, Saos-2 cells, Sf-9, SkBr3, T2, T-47D, T84, THP1 cell line, U373, U87, U937, VCaP, Vero cells, WM39, WT-49, X63, YAC-1, YAR, and transgenic varieties thereof. Cell lines are available from a variety of sources known to those with skill in the art (see, e.g., the American Type Culture Collection (ATCC) (Manassas, Va.)).

[0787] In particular embodiments, transient expression and/or presence of one or more of the components of the AD-functionalized CRISPR system can be of interest, such as to reduce off-target effects. In some embodiments, a cell transfected with one or more vectors described herein is used to establish a new cell line comprising one or more vector-derived sequences. In some embodiments, a cell transiently transfected with the components of a AD-functionalized CRISPR system as described herein (such as by transient transfection of one or more vectors, or transfection with RNA), and modified through the activity of a CRISPR complex, is used to establish a new cell line comprising cells containing the modification but lacking any other exogenous sequence. In some embodiments, cells transiently or non-transiently transfected with one or more vectors described herein, or cell lines derived from such cells are used in assessing one or more test compounds.

[0788] In some embodiments it is envisaged to introduce the RNA and/or protein directly to the host cell. For instance, the CRISPR-Cas protein can be delivered as encoding mRNA together with an in vitro transcribed guide RNA. Such methods can reduce the time to ensure effect of the CRISPR-Cas protein and further prevents long-term expression of the CRISPR system components.

[0789] In some embodiments the RNA molecules of the invention are delivered in liposome or lipofectin formulations and the like and can be prepared by methods well known to those skilled in the art. Such methods are described, for example, in U.S. Pat. Nos. 5,593,972, 5,589,466, and 5,580,859, which are herein incorporated by reference. Delivery systems aimed specifically at the enhanced and improved delivery of siRNA into mammalian cells have been developed, (see, for example, Shen et al FEBS Let. 2003, 539:111-114; Xia et al., Nat. Biotech. 2002, 20:1006-1010; Reich et al., Mol. Vision. 2003, 9: 210-216; Sorensen et al., J. Mol. Biol. 2003, 327: 761-766; Lewis et al., Nat. Gen. 2002, 32: 107-108 and Simeoni et al., NAR 2003, 31, 11: 2717-2724) and may be applied to the present invention. siRNA has recently been successfully used for inhibition of gene expression in primates (see for example. Tolentino et al., Retina 24(4):660 which may also be applied to the present invention.

[0790] Indeed, RNA delivery is a useful method of in vivo delivery. It is possible to deliver Cas13, adenosine deaminase, and guide RNA into cells using liposomes or nanoparticles. Thus delivery of the CRISPR-Cas protein, such as a Cas13, the delivery of the adenosine deaminase (which may be fused to the CRISPR-Cas protein or an adaptor protein), and/or delivery of the RNAs of the invention may be in RNA form and via microvesicles, liposomes or particle or particles. For example, Cas13 mRNA, adenosine deaminase mRNA, and guide RNA can be packaged into liposomal particles for delivery in vivo. Liposomal transfection reagents such as lipofectamine from Life Technologies and other reagents on the market can effectively deliver RNA molecules into the liver.

[0791] Means of delivery of RNA also preferred include delivery of RNA via particles (Cho, S., Goldberg, M., Son, S., Xu, Q., Yang, F., Mei, Y., Bogatyrev, S., Langer, R. and Anderson, D., Lipid-like nanoparticles for small interfering RNA delivery to endothelial cells, Advanced Functional Materials, 19: 3112-3118, 2010) or exosomes (Schroeder, A., Levins, C., Cortez, C., Langer, R., and Anderson, D., Lipid-based nanotherapeutics for siRNA delivery, Journal of Internal Medicine, 267: 9-21, 2010, PMID: 20059641). Indeed, exosomes have been shown to be particularly useful in delivery siRNA, a system with some parallels to the CRISPR system. For instance, El-Andaloussi S, et al. (“Exosome-mediated delivery of siRNA in vitro and in vivo.” Nat Protoc. 2012 December; 7(12):2112-26. doi: 10.1038/nprot.2012.131. Epub 2012 Nov. 15.) describe how exosomes are promising tools for drug delivery across different biological barriers and can be harnessed for delivery of siRNA in vitro and in vivo. Their approach is to generate targeted exosomes through transfection of an expression vector, comprising an exosomal protein fused with a peptide ligand. The exosomes are then purify and characterized from transfected cell supernatant, then RNA is loaded into the exosomes. Delivery or administration according to the invention can be performed with exosomes, in particular but not limited to the brain. Vitamin E (α-tocopherol) may be conjugated with CRISPR Cas and delivered to the brain along with high density lipoprotein (HDL), for example in a similar manner as was done by Uno et al. (HUMAN GENE THERAPY 22:711-719 (June 2011)) for delivering short-interfering RNA (siRNA) to the brain. Mice were infused via Osmotic minipumps (model 1007D; Alzet, Cupertino, Calif.) filled with phosphate-buffered saline (PBS) or free TocsiBACE or Toc-siBACE/HDL and connected with Brain Infusion Kit 3 (Alzet). A brain-infusion cannula was placed about 0.5 mm posterior to the bregma at midline for infusion into the dorsal third ventricle. Uno et al. found that as little as 3 nmol of Toc-siRNA with HDL could induce a target reduction in comparable degree by the same ICV infusion method. A similar dosage of CRISPR Cas conjugated to α-tocopherol and co-administered with HDL targeted to the brain may be contemplated for humans in the present invention, for example, about 3 nmol to about 3 μmol of CRISPR Cas targeted to the brain may be contemplated. Zou et al. ((HUMAN GENE THERAPY 22:465-475 (April 2011)) describes a method of lentiviral-mediated delivery of short-hairpin RNAs targeting PKCγ for in vivo gene silencing in the spinal cord of rats. Zou et al. administered about 10 μl of a recombinant lentivirus having a titer of 1×109 transducing units (TU)/ml by an intrathecal catheter. A similar dosage of CRISPR Cas expressed in a lentiviral vector targeted to the brain may be contemplated for humans in the present invention, for example, about 10-50 ml of CRISPR Cas targeted to the brain in a lentivirus having a titer of 1×109 transducing units (TU)/ml may be contemplated.

[0792] Dosage of Vectors

[0793] In some embodiments, the vector, e.g., plasmid or viral vector is delivered to the tissue of interest by, for example, an intramuscular injection, while other times the delivery is via intravenous, transdermal, intranasal, oral, mucosal, or other delivery methods. Such delivery may be either via a single dose, or multiple doses. One skilled in the art understands that the actual dosage to be delivered herein may vary greatly depending upon a variety of factors, such as the vector choice, the target cell, organism, or tissue, the general condition of the subject to be treated, the degree of transformation/modification sought, the administration route, the administration mode, the type of transformation/modification sought, etc.

[0794] Such a dosage may further contain, for example, a carrier (water, saline, ethanol, glycerol, lactose, sucrose, calcium phosphate, gelatin, dextran, agar, pectin, peanut oil, sesame oil, etc.), a diluent, a pharmaceutically-acceptable carrier (e.g., phosphate-buffered saline), a pharmaceutically-acceptable excipient, and/or other compounds known in the art. The dosage may further contain one or more pharmaceutically acceptable salts such as, for example, a mineral acid salt such as a hydrochloride, a hydrobromide, a phosphate, a sulfate, etc.; and the salts of organic acids such as acetates, propionates, malonates, benzoates, etc. Additionally, auxiliary substances, such as wetting or emulsifying agents, pH buffering substances, gels or gelling materials, flavorings, colorants, microspheres, polymers, suspension agents, etc. may also be present herein. In addition, one or more other conventional pharmaceutical ingredients, such as preservatives, humectants, suspending agents, surfactants, antioxidants, anticaking agents, fillers, chelating agents, coating agents, chemical stabilizers, etc. may also be present, especially if the dosage form is a reconstitutable form. Suitable exemplary ingredients include microcrystalline cellulose, carboxymethylcellulose sodium, polysorbate 80, phenylethyl alcohol, chlorobutanol, potassium sorbate, sorbic acid, sulfur dioxide, propyl gallate, the parabens, ethyl vanillin, glycerin, phenol, parachlorophenol, gelatin, albumin and a combination thereof. A thorough discussion of pharmaceutically acceptable excipients is available in REMINGTON'S PHARMACEUTICAL SCIENCES (Mack Pub. Co., N.J. 1991) which is incorporated by reference herein.

[0795] In an embodiment herein the delivery is via an adenovirus, which may be at a single booster dose containing at least 1×105 particles (also referred to as particle units, pu) of adenoviral vector. In an embodiment herein, the dose preferably is at least about 1×106 particles (for example, about 1×106-1×1012 particles), more preferably at least about 1×107 particles, more preferably at least about 1×108 particles (e.g., about 1×108-1×1011 particles or about 1×108-1×1012 particles), and most preferably at least about 1×100 particles (e.g., about 1×109-1×1010 particles or about 1×109-1×1012 particles), or even at least about 1×1010 particles (e.g., about 1×1010-1×1012 particles) of the adenoviral vector. Alternatively, the dose comprises no more than about 1×1014 particles, preferably no more than about 1×1013 particles, even more preferably no more than about 1×1012 particles, even more preferably no more than about 1×1011 particles, and most preferably no more than about 1×1010 particles (e.g., no more than about 1×109 articles). Thus, the dose may contain a single dose of adenoviral vector with, for example, about 1×106 particle units (pu), about 2×106 pu, about 4×106 pu, about 1×107 pu, about 2×107 pu, about 4×107 pu, about 1×108 pu, about 2×108 pu, about 4×108 pu, about 1×109 pu, about 2×109 pu, about 4×109 pu, about 1×1010 pu, about 2×1010 pu, about 4×1010 pu, about 1×1011 pu, about 2×1011 pu, about 4×1011 pu, about 1×1012 pu, about 2×1012 pu, or about 4×1012 pu of adenoviral vector. See, for example, the adenoviral vectors in U.S. Pat. No. 8,454,972 B2 to Nabel, et. al., granted on Jun. 4, 2013; incorporated by reference herein, and the dosages at col 29, lines 36-58 thereof. In an embodiment herein, the adenovirus is delivered via multiple doses.

[0796] In an embodiment herein, the delivery is via an AAV. A therapeutically effective dosage for in vivo delivery of the AAV to a human is believed to be in the range of from about 20 to about 50 ml of saline solution containing from about 1×1010 to about 1×1010 functional AAV/ml solution. The dosage may be adjusted to balance the therapeutic benefit against any side effects. In an embodiment herein, the AAV dose is generally in the range of concentrations of from about 1×105 to 1×1050 genomes AAV, from about 1×108 to 1×1020 genomes AAV, from about 1×1010 to about 1×1016 genomes, or about 1×1011 to about 1×1016 genomes AAV. A human dosage may be about 1×1013 genomes AAV. Such concentrations may be delivered in from about 0.001 ml to about 100 ml, about 0.05 to about 50 ml, or about 10 to about 25 ml of a carrier solution. Other effective dosages can be readily established by one of ordinary skill in the art through routine trials establishing dose response curves. See, for example, U.S. Pat. No. 8,404,658 B2 to Hajjar, et al., granted on Mar. 26, 2013, at col. 27, lines 45-60.

[0797] In an embodiment herein the delivery is via a plasmid. In such plasmid compositions, the dosage should be a sufficient amount of plasmid to elicit a response. For instance, suitable quantities of plasmid DNA in plasmid compositions can be from about 0.1 to about 2 mg, or from about 1 μg to about 10 μg per 70 kg individual. Plasmids of the invention will generally comprise (i) a promoter; (ii) a sequence encoding a CRISPR-Cas protein, operably linked to said promoter; (iii) a selectable marker; (iv) an origin of replication; and (v) a transcription terminator downstream of and operably linked to (ii). The plasmid can also encode the RNA components of a CRISPR complex, but one or more of these may instead be encoded on a different vector.

[0798] The doses herein are based on an average 70 kg individual. The frequency of administration is within the ambit of the medical or veterinary practitioner (e.g., physician, veterinarian), or scientist skilled in the art. It is also noted that mice used in experiments are typically about 20 g and from mice experiments one can scale up to a 70 kg individual.

[0799] The dosage used for the compositions provided herein include dosages for repeated administration or repeat dosing. In particular embodiments, the administration is repeated within a period of several weeks, months, or years. Suitable assays can be performed to obtain an optimal dosage regime. Repeated administration can allow the use of lower dosage, which can positively affect off-target modifications.

[0800] RNA Delivery

[0801] In particular embodiments, RNA based delivery is used. In these embodiments, mRNA of the CRISPR-Cas protein, mRNA of the adenosine deaminase (which may be fused to a CRISPR-Cas protein or an adaptor), are delivered together with in vitro transcribed guide RNA. Liang et al. describes efficient genome editing using RNA based delivery (Protein Cell. 2015 May; 6(5): 363-372). In some embodiments, the mRNA(s) encoding Cas13 and/or adenosine deaminase can be chemically modified, which may lead to improved activity compared to plasmid-encoded Cas13 and/or adenosine deaminase. For example, uridines in the mRNA(s) can be partially or fully substituted with pseudouridine (Ψ), N1-methylpseudouridine (me1Ψ), 5-methoxyuridine (5moU). See Li et al., Nature Biomedical Engineering 1, 0066 DOI:10.1038/s41551-017-0066 (2017), which is incorporated herein by reference in its entirety.

[0802] RNP Delivery

[0803] In particular embodiments, pre-complexed guide RNA, CRISPR-Cas protein, and adenosine deaminase (which may be fused to a CRISPR-Cas protein or an adaptor) are delived as a ribonucleoprotein (RNP). RNPs have the advantage that they lead to rapid editing effects even more so than the RNA method because this process avoids the need for transcription. An important advantage is that both RNP delivery is transient, reducing off-target effects and toxicity issues. Efficient genome editing in different cell types has been observed by Kim et al. (2014, Genome Res. 24(6):1012-9), Paix et al. (2015, Genetics 204(1):47-54), Chu et al. (2016, BMC Biotechnol. 16:4), and Wang et al. (2013, Cell. 9; 153(4):910-8).

[0804] In particular embodiments, the ribonucleoprotein is delivered by way of a polypeptide-based shuttle agent as described in WO2016161516. WO2016161516 describes efficient transduction of polypeptide cargos using synthetic peptides comprising an endosome leakage domain (ELD) operably linked to a cell penetrating domain (CPD), to a histidine-rich domain and a CPD. Similarly these polypeptides can be used for the delivery of CRISPR-effector based RNPs in eukaryotic cells.

[0805] Particles

[0806] In some aspects or embodiments, a composition comprising a delivery particle formulation may be used. In some aspects or embodiments, the formulation comprises a CRISPR complex, the complex comprising a CRISPR protein and a guide which directs sequence-specific binding of the CRISPR complex to a target sequence. In some embodiments, the delivery particle comprises a lipid-based particle, optionally a lipid nanoparticle, or cationic lipid and optionally biodegradable polymer. In some embodiments, the cationic lipid comprises 1,2-dioleoyl-3-trimethylammonium-propane (DOTAP). In some embodiments, the hydrophilic polymer comprises ethylene glycol or polyethylene glycol. In some embodiments, the delivery particle further comprises a lipoprotein, preferably cholesterol. In some embodiments, the delivery particles are less than 500 nm in diameter, optionally less than 250 nm in diameter, optionally less than 100 nm in diameter, optionally about 35 nm to about 60 nm in diameter.

[0807] Example particle delivery complexes are further disclosed in U.S. Provisional Application entitled “Nove Delivery of Large Payloads” filed 62/485,625 filed Apr. 14, 2017.

[0808] Several types of particle delivery systems and/or formulations are known to be useful in a diverse spectrum of biomedical applications. In general, a particle is defined as a small object that behaves as a whole unit with respect to its transport and properties. Particles are further classified according to diameter. Coarse particles cover a range between 2,500 and 10,000 nanometers. Fine particles are sized between 100 and 2,500 nanometers. Ultrafine particles, or nanoparticles, are generally between 1 and 100 nanometers in size. The basis of the 100-nm limit is the fact that novel properties that differentiate particles from the bulk material typically develop at a critical length scale of under 100 nm.

[0809] As used herein, a particle delivery system/formulation is defined as any biological delivery system/formulation which includes a particle in accordance with the present invention. A particle in accordance with the present invention is any entity having a greatest dimension (e.g. diameter) of less than 100 microns (μm). In some embodiments, inventive particles have a greatest dimension of less than 10 μm. In some embodiments, inventive particles have a greatest dimension of less than 2000 nanometers (nm). In some embodiments, inventive particles have a greatest dimension of less than 1000 nanometers (nm). In some embodiments, inventive particles have a greatest dimension of less than 900 nm, 800 nm, 700 nm, 600 nm, 500 nm, 400 nm, 300 nm, 200 nm, or 100 nm. Typically, inventive particles have a greatest dimension (e.g., diameter) of 500 nm or less. In some embodiments, inventive particles have a greatest dimension (e.g., diameter) of 250 nm or less. In some embodiments, inventive particles have a greatest dimension (e.g., diameter) of 200 nm or less. In some embodiments, inventive particles have a greatest dimension (e.g., diameter) of 150 nm or less. In some embodiments, inventive particles have a greatest dimension (e.g., diameter) of 100 nm or less. Smaller particles, e.g., having a greatest dimension of 50 nm or less are used in some embodiments of the invention. In some embodiments, inventive particles have a greatest dimension ranging between 25 nm and 200 nm.

[0810] In terms of this invention, it is preferred to have one or more components of CRISPR complex, e.g., CRISPR-Cas protein or mRNA, or adenosine deaminase (which may be fused to a CRISPR-Cas protein or an adaptor) or mRNA, or guide RNA delivered using nanoparticles or lipid envelopes. Other delivery systems or vectors are may be used in conjunction with the nanoparticle aspects of the invention.

[0811] In general, a “nanoparticle” refers to any particle having a diameter of less than 1000 nm. In certain preferred embodiments, nanoparticles of the invention have a greatest dimension (e.g., diameter) of 500 nm or less. In other preferred embodiments, nanoparticles of the invention have a greatest dimension ranging between 25 nm and 200 nm. In other preferred embodiments, nanoparticles of the invention have a greatest dimension of 100 nm or less. In other preferred embodiments, nanoparticles of the invention have a greatest dimension ranging between 35 nm and 60 nm. It will be appreciated that reference made herein to particles or nanoparticles can be interchangeable, where appropriate.

[0812] It will be understood that the size of the particle will differ depending as to whether it is measured before or after loading. Accordingly, in particular embodiments, the term “nanoparticles” may apply only to the particles pre loading.

[0813] Nanoparticles encompassed in the present invention may be provided in different forms, e.g., as solid nanoparticles (e.g., metal such as silver, gold, iron, titanium), non-metal, lipid-based solids, polymers), suspensions of nanoparticles, or combinations thereof. Metal, dielectric, and semiconductor nanoparticles may be prepared, as well as hybrid structures (e.g., core-shell nanoparticles). Nanoparticles made of semiconducting material may also be labeled quantum dots if they are small enough (typically sub 10 nm) that quantization of electronic energy levels occurs. Such nanoscale particles are used in biomedical applications as drug carriers or imaging agents and may be adapted for similar purposes in the present invention.

[0814] Semi-solid and soft nanoparticles have been manufactured, and are within the scope of the present invention. A prototype nanoparticle of semi-solid nature is the liposome. Various types of liposome nanoparticles are currently used clinically as delivery systems for anticancer drugs and vaccines. Nanoparticles with one half hydrophilic and the other half hydrophobic are termed Janus particles and are particularly effective for stabilizing emulsions. They can self-assemble at water/oil interfaces and act as solid surfactants.

[0815] Particle characterization (including e.g., characterizing morphology, dimension, etc.) is done using a variety of different techniques. Common techniques are electron microscopy (TEM, SEM), atomic force microscopy (AFM), dynamic light scattering (DLS), X-ray photoelectron spectroscopy (XPS), powder X-ray diffraction (XRD), Fourier transform infrared spectroscopy (FTIR), matrix-assisted laser desorption/ionization time-of-flight mass spectrometry (MALDI-TOF), ultraviolet-visible spectroscopy, dual polarization interferometry and nuclear magnetic resonance (NMR). Characterization (dimension measurements) may be made as to native particles (i.e., preloading) or after loading of the cargo (herein cargo refers to e.g., one or more components of CRISPR-Cas system e.g., CRISPR-Cas protein or mRNA, adenosine deaminase (which may be fused to a CRISPR-Cas protein or an adaptor) or mRNA, or guide RNA, or any combination thereof, and may include additional carriers and/or excipients) to provide particles of an optimal size for delivery for any in vitro, ex vivo and/or in vivo application of the present invention. In certain preferred embodiments, particle dimension (e.g., diameter) characterization is based on measurements using dynamic laser scattering (DLS). Mention is made of U.S. Pat. Nos. 8,709,843; 6,007,845; 5,855,913; 5,985,309; 5,543,158; and the publication by James E. Dahlman and Carmen Barnes et al. Nature Nanotechnology (2014) published online 11 May 2014, doi:10.1038/nnano.2014.84, concerning particles, methods of making and using them and measurements thereof.

[0816] Particles delivery systems within the scope of the present invention may be provided in any form, including but not limited to solid, semi-solid, emulsion, or colloidal particles. As such any of the delivery systems described herein, including but not limited to, e.g., lipid-based systems, liposomes, micelles, microvesicles, exosomes, or gene gun may be provided as particle delivery systems within the scope of the present invention.

[0817] CRISPR-Cas protein mRNA, adenosine deaminase (which may be fused to a CRISPR-Cas protein or an adaptor) or mRNA, and guide RNA may be delivered simultaneously using particles or lipid envelopes; for instance, CRISPR-Cas protein and RNA of the invention, e.g., as a complex, can be delivered via a particle as in Dahlman et al., WO2015089419 A2 and documents cited therein, such as 7C1 (see, e.g., James E. Dahlman and Carmen Barnes et al. Nature Nanotechnology (2014) published online 11 May 2014, doi:10.1038/nnano.2014.84), e.g., delivery particle comprising lipid or lipidoid and hydrophilic polymer, e.g., cationic lipid and hydrophilic polymer, for instance wherein the cationic lipid comprises 1,2-dioleoyl-3-trimethylammonium-propane (DOTAP) or 1,2-ditetradecanoyl-sn-glycero-3-phosphocholine (DMPC) and/or wherein the hydrophilic polymer comprises ethylene glycol or polyethylene glycol (PEG); and/or wherein the particle further comprises cholesterol (e.g., particle from formulation 1=DOTAP 100, DMPC 0, PEG 0, Cholesterol 0; formulation number 2=DOTAP 90, DMPC 0, PEG 10, Cholesterol 0; formulation number 3=DOTAP 90, DMPC 0, PEG 5, Cholesterol 5), wherein particles are formed using an efficient, multistep process wherein first, effector protein and RNA are mixed together, e.g., at a 1:1 molar ratio, e.g., at room temperature, e.g., for 30 minutes, e.g., in sterile, nuclease free 1X PBS; and separately, DOTAP, DMPC, PEG, and cholesterol as applicable for the formulation are dissolved in alcohol, e.g., 100% ethanol; and, the two solutions are mixed together to form particles containing the complexes).

[0818] Nucleic acid-targeting effector proteins (e.g., a Type V protein such as Cas13) mRNA and guide RNA may be delivered simultaneously using particles or lipid envelopes. Examples of suitable particles include but are not limited to those described in U.S. Pat. No. 9,301,923.

[0819] For example, Su X, Fricke J, Kavanagh D G, Irvine D J (“In vitro and in vivo mRNA delivery using lipid-enveloped pH-responsive polymer nanoparticles” Mol Pharm. 2011 Jun. 6; 8(3):774-87. doi: 10.1021/mp100390w. Epub 2011 Apr. 1) describes biodegradable core-shell structured nanoparticles with a poly(β-amino ester) (PBAE) core enveloped by a phospholipid bilayer shell. These were developed for in vivo mRNA delivery. The pH-responsive PBAE component was chosen to promote endosome disruption, while the lipid surface layer was selected to minimize toxicity of the polycation core. Such are, therefore, preferred for delivering RNA of the present invention.

[0820] In one embodiment, particles/nanoparticles based on self assembling bioadhesive polymers are contemplated, which may be applied to oral delivery of peptides, intravenous delivery of peptides and nasal delivery of peptides, all to the brain. Other embodiments, such as oral absorption and ocular delivery of hydrophobic drugs are also contemplated. The molecular envelope technology involves an engineered polymer envelope which is protected and delivered to the site of the disease (see, e.g., Mazza, M. et al. ACS Nano, 2013. 7(2): 1016-1026; Siew, A., et al. Mol Pharm, 2012. 9(1):14-28; Lalatsa, A., et al. J Contr Rel, 2012. 161(2):523-36; Lalatsa, A., et al., Mol Pharm, 2012. 9(6):1665-80; Lalatsa, A., et al. Mol Pharm, 2012. 9(6):1764-74; Garrett, N. L., et al. J Biophotonics, 2012. 5(5-6):458-68; Garrett, N. L., et al. J Raman Spect, 2012. 43(5):681-688; Ahmad, S., et al. J Royal Soc Interface 2010. 7:S423-33; Uchegbu, I. F. Expert Opin Drug Deliv, 2006. 3(5):629-40; Qu, X., et al. Biomacromolecules, 2006. 7(12):3452-9 and Uchegbu, I. F., et al. Int J Pharm, 2001. 224:185-199). Doses of about 5 mg/kg are contemplated, with single or multiple doses, depending on the target tissue.

[0821] In one embodiment, particles/nanoparticles that can deliver RNA to a cancer cell to stop tumor growth developed by Dan Anderson's lab at MIT may be used/and or adapted to the AD-functionalized CRISPR-Cas system of the present invention. In particular, the Anderson lab developed fully automated, combinatorial systems for the synthesis, purification, characterization, and formulation of new biomaterials and nanoformulations. See, e.g., Alabi et al., Proc Natl Acad Sci USA. 2013 Aug. 6; 110(32):12881-6; Zhang et al., Adv Mater. 2013 September 6; 25(33):4641-5; Jiang et al., Nano Lett. 2013 Mar. 13; 13(3):1059-64; Karagiannis et al., ACS Nano. 2012 Oct. 23; 6(10):8484-7; Whitehead et al., ACS Nano. 2012 Aug. 28; 6(8):6922-9 and Lee et al., Nat Nanotechnol. 2012 Jun. 3; 7(6):389-93.

[0822] US patent application 20110293703 relates to lipidoid compounds are also particularly useful in the administration of polynucleotides, which may be applied to deliver the AD-functionalized CRISPR-Cas system of the present invention. In one aspect, the aminoalcohol lipidoid compounds are combined with an agent to be delivered to a cell or a subject to form microparticles, nanoparticles, liposomes, or micelles. The agent to be delivered by the particles, liposomes, or micelles may be in the form of a gas, liquid, or solid, and the agent may be a polynucleotide, protein, peptide, or small molecule. The aminoalcohol lipidoid compounds may be combined with other aminoalcohol lipidoid compounds, polymers (synthetic or natural), surfactants, cholesterol, carbohydrates, proteins, lipids, etc. to form the particles. These particles may then optionally be combined with a pharmaceutical excipient to form a pharmaceutical composition.

[0823] US Patent Publication No. 20110293703 also provides methods of preparing the aminoalcohol lipidoid compounds. One or more equivalents of an amine are allowed to react with one or more equivalents of an epoxide-terminated compound under suitable conditions to form an aminoalcohol lipidoid compound of the present invention. In certain embodiments, all the amino groups of the amine are fully reacted with the epoxide-terminated compound to form tertiary amines. In other embodiments, all the amino groups of the amine are not fully reacted with the epoxide-terminated compound to form tertiary amines thereby resulting in primary or secondary amines in the aminoalcohol lipidoid compound. These primary or secondary amines are left as is or may be reacted with another electrophile such as a different epoxide-terminated compound. As will be appreciated by one skilled in the art, reacting an amine with less than excess of epoxide-terminated compound will result in a plurality of different aminoalcohol lipidoid compounds with various numbers of tails. Certain amines may be fully functionalized with two epoxide-derived compound tails while other molecules will not be completely functionalized with epoxide-derived compound tails. For example, a diamine or polyamine may include one, two, three, or four epoxide-derived compound tails off the various amino moieties of the molecule resulting in primary, secondary, and tertiary amines. In certain embodiments, all the amino groups are not fully functionalized. In certain embodiments, two of the same types of epoxide-terminated compounds are used. In other embodiments, two or more different epoxide-terminated compounds are used. The synthesis of the aminoalcohol lipidoid compounds is performed with or without solvent, and the synthesis may be performed at higher temperatures ranging from 30-100° C., preferably at approximately 50-90° C. The prepared aminoalcohol lipidoid compounds may be optionally purified. For example, the mixture of aminoalcohol lipidoid compounds may be purified to yield an aminoalcohol lipidoid compound with a particular number of epoxide-derived compound tails. Or the mixture may be purified to yield a particular stereo- or regioisomer. The aminoalcohol lipidoid compounds may also be alkylated using an alkyl halide (e.g., methyl iodide) or other alkylating agent, and/or they may be acylated.

[0824] US Patent Publication No. 20110293703 also provides libraries of aminoalcohol lipidoid compounds prepared by the inventive methods. These aminoalcohol lipidoid compounds may be prepared and/or screened using high-throughput techniques involving liquid handlers, robots, microtiter plates, computers, etc. In certain embodiments, the aminoalcohol lipidoid compounds are screened for their ability to transfect polynucleotides or other agents (e.g., proteins, peptides, small molecules) into the cell.

[0825] US Patent Publication No. 20130302401 relates to a class of poly(beta-amino alcohols) (PBAAs) has been prepared using combinatorial polymerization. The inventive PBAAs may be used in biotechnology and biomedical applications as coatings (such as coatings of films or multilayer films for medical devices or implants), additives, materials, excipients, non-biofouling agents, micropatterning agents, and cellular encapsulation agents. When used as surface coatings, these PBAAs elicited different levels of inflammation, both in vitro and in vivo, depending on their chemical structures. The large chemical diversity of this class of materials allowed us to identify polymer coatings that inhibit macrophage activation in vitro. Furthermore, these coatings reduce the recruitment of inflammatory cells, and reduce fibrosis, following the subcutaneous implantation of carboxylated polystyrene microparticles. These polymers may be used to form polyelectrolyte complex capsules for cell encapsulation. The invention may also have many other biological applications such as antimicrobial coatings, DNA or siRNA delivery, and stem cell tissue engineering. The teachings of US Patent Publication No. 20130302401 may be applied to the AD-functionalized CRISPR-Cas system of the present invention.

[0826] Preassembled recombinant CRISPR-Cas complexes comprising Cas13, adenosine deaminase (which may be fused to Cas13 or an adaptor protein), and guide RNA may be transfected, for example by electroporation, resulting in high mutation rates and absence of detectable off-target mutations. Hur, J. K. et al, Targeted mutagenesis in mice by electroporation of Cas13 ribonucleoproteins, Nat Biotechnol. 2016 Jun. 6. doi: 10.1038/nbt.3596.

[0827] In terms of local delivery to the brain, this can be achieved in various ways. For instance, material can be delivered intrastriatally e.g. by injection. Injection can be performed stereotactically via a craniotomy.

[0828] In some embodiments, sugar-based particles may be used, for example GaNAc, as described herein and with reference to WO2014118272 (incorporated herein by reference) and Nair, J K et al., 2014, Journal of the American Chemical Society 136 (49), 16958-16961) and the teaching herein, especially in respect of delivery applies to all particles unless otherwise apparent. This may be considered to be a sugar-based particle and further details on other particle delivery systems and/or formulations are provided herein. GalNAc can therefore be considered to be a particle in the sense of the other particles described herein, such that general uses and other considerations, for instance delivery of said particles, apply to GaNAc particles as well. A solution-phase conjugation strategy may for example be used to attach triantennary GalNAc clusters (mol. wt. ˜2000) activated as PFP (pentafluorophenyl) esters onto 5′-hexylamino modified oligonucleotides (5′-HA ASOs, mol. wt. ˜8000 Da; Østergaard et al., Bioconjugate Chem., 2015, 26 (8), pp 1451-1455). Similarly, poly(acrylate) polymers have been described for in vivo nucleic acid delivery (see WO2013158141 incorporated herein by reference). In further alternative embodiments, pre-mixing CRISPR nanoparticles (or protein complexes) with naturally occurring serum proteins may be used in order to improve delivery (Akinc A et al, 2010, Molecular Therapy vol. 18 no. 7, 1357-1364).

[0829] Nanoclews

[0830] Further, the AD-functionalized CRISPR system may be delivered using nanoclews, for example as described in Sun W et al, Cocoon-like self-degradable DNA nanoclew for anticancer drug delivery., J Am Chem Soc. 2014 Oct. 22; 136(42):14722-5. doi: 10.1021/ja5088024. Epub 2014 Oct. 13.; or in Sun W et al, Self-Assembled DNA Nanoclews for the Efficient Delivery of CRISPR-Cas9 for Genome Editing., Angew Chem Int Ed Engl. 2015 Oct. 5; 54(41):12029-33. doi: 10.1002/anie.201506030. Epub 2015 Aug. 27.

[0831] LNP

[0832] In some embodiments, delivery is by encapsulation of the Cas13 protein or mRNA form in a lipid particle such as an LNP. In some embodiments, therefore, lipid nanoparticles (LNPs) are contemplated. An antitransthyretin small interfering RNA has been encapsulated in lipid nanoparticles and delivered to humans (see, e.g., Coelho et al., N Engl J Med 2013; 369:819-29), and such a system may be adapted and applied to the CRISPR Cas system of the present invention. Doses of about 0.01 to about 1 mg per kg of body weight administered intravenously are contemplated. Medications to reduce the risk of infusion-related reactions are contemplated, such as dexamethasone, acetampinophen, diphenhydramine or cetirizine, and ranitidine are contemplated. Multiple doses of about 0.3 mg per kilogram every 4 weeks for five doses are also contemplated.

[0833] LNPs have been shown to be highly effective in delivering siRNAs to the liver (see, e.g., Tabernero et al., Cancer Discovery, April 2013, Vol. 3, No. 4, pages 363-470) and are therefore contemplated for delivering RNA encoding CRISPR Cas to the liver. A dosage of about four doses of 6 mg/kg of the LNP every two weeks may be contemplated. Tabernero et al. demonstrated that tumor regression was observed after the first 2 cycles of LNPs dosed at 0.7 mg/kg, and by the end of 6 cycles the patient had achieved a partial response with complete regression of the lymph node metastasis and substantial shrinkage of the liver tumors. A complete response was obtained after 40 doses in this patient, who has remained in remission and completed treatment after receiving doses over 26 months. Two patients with RCC and extrahepatic sites of disease including kidney, lung, and lymph nodes that were progressing following prior therapy with VEGF pathway inhibitors had stable disease at all sites for approximately 8 to 12 months, and a patient with PNET and liver metastases continued on the extension study for 18 months (36 doses) with stable disease.

[0834] However, the charge of the LNP must be taken into consideration. As cationic lipids combined with negatively charged lipids to induce nonbilayer structures that facilitate intracellular delivery. Because charged LNPs are rapidly cleared from circulation following intravenous injection, ionizable cationic lipids with pKa values below 7 were developed (see, e.g., Rosin et al, Molecular Therapy, vol. 19, no. 12, pages 1286-2200, December 2011). Negatively charged polymers such as RNA may be loaded into LNPs at low pH values (e.g., pH 4) where the ionizable lipids display a positive charge. However, at physiological pH values, the LNPs exhibit a low surface charge compatible with longer circulation times. Four species of ionizable cationic lipids have been focused upon, namely 1,2-dilineoyl-3-dimethylammonium-propane (DLinDAP), 1,2-dilinoleyloxy-3-N,N-dimethylaminopropane (DLinDMA), 1,2-dilinoleyloxy-keto-N,N-dimethyl-3-aminopropane (DLinKDMA), and 1,2-dilinoleyl-4-(2-dimethylaminoethyl)-[1,3]-dioxolane (DLinKC2-DMA). It has been shown that LNP siRNA systems containing these lipids exhibit remarkably different gene silencing properties in hepatocytes in vivo, with potencies varying according to the series DLinKC2-DMA>DLinKDMA>DLinDMA>>DLinDAP employing a Factor VII gene silencing model (see, e.g., Rosin et al, Molecular Therapy, vol. 19, no. 12, pages 1286-2200, December 2011). A dosage of 1 g/ml of LNP or CRISPR-Cas RNA in or associated with the LNP may be contemplated, especially for a formulation containing DLinKC2-DMA.

[0835] Preparation of LNPs and CRISPR Cas encapsulation may be used/and or adapted from Rosin et al, Molecular Therapy, vol. 19, no. 12, pages 1286-2200, December 2011). The cationic lipids 1,2-dilineoyl-3-dimethylammonium-propane (DLinDAP), 1,2-dilinoleyloxy-3-N,N-dimethylaminopropane (DLinDMA), 1,2-dilinoleyloxyketo-N,N-dimethyl-3-aminopropane (DLinK-DMA), 1,2-dilinoleyl-4-(2-dimethylaminoethyl)-[1,3]-dioxolane (DLinKC2-DMA), (3-o-[2″-(methoxypolyethyleneglycol 2000) succinoyl]-1,2-dimyristoyl-sn-glycol (PEG-S-DMG), and R-3-[(o-methoxy-poly(ethylene glycol)2000) carbamoyl]-1,2-dimyristyloxlpropyl-3-amine (PEG-C-DOMG) may be provided by Tekmira Pharmaceuticals (Vancouver, Canada) or synthesized. Cholesterol may be purchased from Sigma (St Louis, Mo.). The specific CRISPR Cas RNA may be encapsulated in LNPs containing DLinDAP, DLinDMA, DLinK-DMA, and DLinKC2-DMA (cationic lipid:DSPC:CHOL: PEGS-DMG or PEG-C-DOMG at 40:10:40:10 molar ratios). When required, 0.2% SP-DiOC18 (Invitrogen, Burlington, Canada) may be incorporated to assess cellular uptake, intracellular delivery, and biodistribution. Encapsulation may be performed by dissolving lipid mixtures comprised of cationic lipid:DSPC:cholesterol:PEG-c-DOMG (40:10:40:10 molar ratio) in ethanol to a final lipid concentration of 10 mmol/l. This ethanol solution of lipid may be added drop-wise to 50 mmol/l citrate, pH 4.0 to form multilamellar vesicles to produce a final concentration of 30% ethanol vol/vol. Large unilamellar vesicles may be formed following extrusion of multilamellar vesicles through two stacked 80 nm Nuclepore polycarbonate filters using the Extruder (Northern Lipids, Vancouver, Canada). Encapsulation may be achieved by adding RNA dissolved at 2 mg/ml in 50 mmol/l citrate, pH 4.0 containing 30% ethanol vol/vol drop-wise to extruded preformed large unilamellar vesicles and incubation at 31° C. for 30 minutes with constant mixing to a final RNA/lipid weight ratio of 0.06/1 wt/wt. Removal of ethanol and neutralization of formulation buffer were performed by dialysis against phosphate-buffered saline (PBS), pH 7.4 for 16 hours using Spectra/Por 2 regenerated cellulose dialysis membranes. Nanoparticle size distribution may be determined by dynamic light scattering using a NICOMP 370 particle sizer, the vesicle/intensity modes, and Gaussian fitting (Nicomp Particle Sizing, Santa Barbara, Calif.). The particle size for all three LNP systems may be ˜70 nm in diameter. RNA encapsulation efficiency may be determined by removal of free RNA using VivaPureD MiniH columns (Sartorius Stedim Biotech) from samples collected before and after dialysis. The encapsulated RNA may be extracted from the eluted nanoparticles and quantified at 260 nm. RNA to lipid ratio was determined by measurement of cholesterol content in vesicles using the Cholesterol E enzymatic assay from Wako Chemicals USA (Richmond, Va.). In conjunction with the herein discussion of LNPs and PEG lipids, PEGylated liposomes or LNPs are likewise suitable for delivery of a CRISPR-Cas system or components thereof.

[0836] A lipid premix solution (20.4 mg/ml total lipid concentration) may be prepared in ethanol containing DLinKC2-DMA, DSPC, and cholesterol at 50:10:38.5 molar ratios. Sodium acetate may be added to the lipid premix at a molar ratio of 0.75:1 (sodium acetate:DLinKC2-DMA). The lipids may be subsequently hydrated by combining the mixture with 1.85 volumes of citrate buffer (10 mmol/1, pH 3.0) with vigorous stirring, resulting in spontaneous liposome formation in aqueous buffer containing 35% ethanol. The liposome solution may be incubated at 37° C. to allow for time-dependent increase in particle size. Aliquots may be removed at various times during incubation to investigate changes in liposome size by dynamic light scattering (Zetasizer Nano Z S, Malvern Instruments, Worcestershire, UK). Once the desired particle size is achieved, an aqueous PEG lipid solution (stock=10 mg/ml PEG-DMG in 35% (vol/vol) ethanol) may be added to the liposome mixture to yield a final PEG molar concentration of 3.5% of total lipid. Upon addition of PEG-lipids, the liposomes should their size, effectively quenching further growth. RNA may then be added to the empty liposomes at an RNA to total lipid ratio of approximately 1:10 (wt:wt), followed by incubation for 30 minutes at 37° C. to form loaded LNPs. The mixture may be subsequently dialyzed overnight in PBS and filtered with a 0.45-μm syringe filter.

[0837] Spherical Nucleic Acid (SNA™) constructs and other nanoparticles (particularly gold nanoparticles) are also contemplated as a means to delivery CRISPR-Cas system to intended targets. Significant data show that AuraSense Therapeutics' Spherical Nucleic Acid (SNA™) constructs, based upon nucleic acid-functionalized gold nanoparticles, are useful.

[0838] Literature that may be employed in conjunction with herein teachings include: Cutler et al., J. Am. Chem. Soc. 2011 133:9254-9257, Hao et al., Small. 2011 7:3158-3162, Zhang et al., ACS Nano. 2011 5:6962-6970, Cutler et al., J. Am. Chem. Soc. 2012 134:1376-1391, Young et al., Nano Lett. 2012 12:3867-71, Zheng et al., Proc. Natl. Acad. Sci. USA. 2012 109:11975-80, Mirkin, Nanomedicine 2012 7:635-638 Zhang et al., J. Am. Chem. Soc. 2012 134:16488-1691, Weintraub, Nature 2013 495:S14-S16, Choi et al., Proc. Natl. Acad. Sci. USA. 2013 110(19):7625-7630, Jensen et al., Sci. Transl. Med. 5, 209ra152 (2013) and Mirkin, et al., Small, 10:186-192.

[0839] Self-assembling nanoparticles with RNA may be constructed with polyethyleneimine (PEI) that is PEGylated with an Arg-Gly-Asp (RGD) peptide ligand attached at the distal end of the polyethylene glycol (PEG). This system has been used, for example, as a means to target tumor neovasculature expressing integrins and deliver siRNA inhibiting vascular endothelial growth factor receptor-2 (VEGF R2) expression and thereby achieve tumor angiogenesis (see, e.g., Schiffelers et al., Nucleic Acids Research, 2004, Vol. 32, No. 19). Nanoplexes may be prepared by mixing equal volumes of aqueous solutions of cationic polymer and nucleic acid to give a net molar excess of ionizable nitrogen (polymer) to phosphate (nucleic acid) over the range of 2 to 6. The electrostatic interactions between cationic polymers and nucleic acid resulted in the formation of polyplexes with average particle size distribution of about 100 nm, hence referred to here as nanoplexes. A dosage of about 100 to 200 mg of CRISPR Cas is envisioned for delivery in the self-assembling nanoparticles of Schiffelers et al.

[0840] The nanoplexes of Bartlett et al. (PNAS, Sep. 25, 2007, vol. 104, no. 39) may also be applied to the present invention. The nanoplexes of Bartlett et al. are prepared by mixing equal volumes of aqueous solutions of cationic polymer and nucleic acid to give a net molar excess of ionizable nitrogen (polymer) to phosphate (nucleic acid) over the range of 2 to 6. The electrostatic interactions between cationic polymers and nucleic acid resulted in the formation of polyplexes with average particle size distribution of about 100 nm, hence referred to here as nanoplexes. The DOTA-siRNA of Bartlett et al. was synthesized as follows: 1,4,7,10-tetraazacyclododecane-1,4,7,10-tetraacetic acid mono(N-hydroxysuccinimide ester) (DOTA-NHSester) was ordered from Macrocyclics (Dallas, Tex.). The amine modified RNA sense strand with a 100-fold molar excess of DOTA-NHS-ester in carbonate buffer (pH 9) was added to a microcentrifuge tube. The contents were reacted by stirring for 4 h at room temperature. The DOTA-RNAsense conjugate was ethanol-precipitated, resuspended in water, and annealed to the unmodified antisense strand to yield DOTA-siRNA. All liquids were pretreated with Chelex-100 (Bio-Rad, Hercules, Calif.) to remove trace metal contaminants. Tf-targeted and nontargeted siRNA nanoparticles may be formed by using cyclodextrin-containing polycations. Typically, nanoparticles were formed in water at a charge ratio of 3 (+/−) and an siRNA concentration of 0.5 g/liter. One percent of the adamantane-PEG molecules on the surface of the targeted nanoparticles were modified with Tf (adamantane-PEG-Tf). The nanoparticles were suspended in a 5% (wt/vol) glucose carrier solution for injection.

[0841] Davis et al. (Nature, Vol 464, 15 Apr. 2010) conducts a RNA clinical trial that uses a targeted nanoparticle-delivery system (clinical trial registration number NCT00689065). Patients with solid cancers refractory to standard-of-care therapies are administered doses of targeted nanoparticles on days 1, 3, 8 and 10 of a 21-day cycle by a 30-min intravenous infusion. The nanoparticles consist of a synthetic delivery system containing: (1) a linear, cyclodextrin-based polymer (CDP), (2) a human transferrin protein (TF) targeting ligand displayed on the exterior of the nanoparticle to engage TF receptors (TFR) on the surface of the cancer cells, (3) a hydrophilic polymer (polyethylene glycol (PEG) used to promote nanoparticle stability in biological fluids), and (4) siRNA designed to reduce the expression of the RRM2 (sequence used in the clinic was previously denoted siR2B+5). The TFR has long been known to be upregulated in malignant cells, and RRM2 is an established anti-cancer target. These nanoparticles (clinical version denoted as CALAA-01) have been shown to be well tolerated in multi-dosing studies in non-human primates. Although a single patient with chronic myeloid leukaemia has been administered siRNA by liposomal delivery, Davis et al.'s clinical trial is the initial human trial to systemically deliver siRNA with a targeted delivery system and to treat patients with solid cancer. To ascertain whether the targeted delivery system can provide effective delivery of functional siRNA to human tumors, Davis et al. investigated biopsies from three patients from three different dosing cohorts; patients A, B and C, all of whom had metastatic melanoma and received CALAA-01 doses of 18, 24 and 30 mg m-2 siRNA, respectively. Similar doses may also be contemplated for the CRISPR Cas system of the present invention. The delivery of the invention may be achieved with nanoparticles containing a linear, cyclodextrin-based polymer (CDP), a human transferrin protein (TF) targeting ligand displayed on the exterior of the nanoparticle to engage TF receptors (TFR) on the surface of the cancer cells and/or a hydrophilic polymer (for example, polyethylene glycol (PEG) used to promote nanoparticle stability in biological fluids).

[0842] U.S. Pat. No. 8,709,843, incorporated herein by reference, provides a drug delivery system for targeted delivery of therapeutic agent-containing particles to tissues, cells, and intracellular compartments. The invention provides targeted particles comprising comprising polymer conjugated to a surfactant, hydrophilic polymer or lipid. U.S. Pat. No. 6,007,845, incorporated herein by reference, provides particles which have a core of a multiblock copolymer formed by covalently linking a multifunctional compound with one or more hydrophobic polymers and one or more hydrophilic polymers, and contain a biologically active material. U.S. Pat. No. 5,855,913, incorporated herein by reference, provides a particulate composition having aerodynamically light particles having a tap density of less than 0.4 g/cm3 with a mean diameter of between 5 μm and 30 μm, incorporating a surfactant on the surface thereof for drug delivery to the pulmonary system. U.S. Pat. No. 5,985,309, incorporated herein by reference, provides particles incorporating a surfactant and/or a hydrophilic or hydrophobic complex of a positively or negatively charged therapeutic or diagnostic agent and a charged molecule of opposite charge for delivery to the pulmonary system. U.S. Pat. No. 5,543,158, incorporated herein by reference, provides biodegradable injectable particles having a biodegradable solid core containing a biologically active material and poly(alkylene glycol) moieties on the surface. WO2012135025 (also published as US20120251560), incorporated herein by reference, describes conjugated polyethyleneimine (PEI) polymers and conjugated aza-macrocycles (collectively referred to as “conjugated lipomer” or “lipomers”). In certain embodiments, it can envisioned that such conjugated lipomers can be used in the context of the CRISPR-Cas system to achieve in vitro, ex vivo and in vivo genomic perturbations to modify gene expression, including modulation of protein expression.

[0843] In one embodiment, the nanoparticle may be epoxide-modified lipid-polymer, advantageously 7C1 (see, e.g., James E. Dahlman and Carmen Barnes et al. Nature Nanotechnology (2014) published online 11 May 2014, doi:10.1038/nnano.2014.84). C71 was synthesized by reacting C15 epoxide-terminated lipids with PEI600 at a 14:1 molar ratio, and was formulated with C14PEG2000 to produce nanoparticles (diameter between 35 and 60 nm) that were stable in PBS solution for at least 40 days.

[0844] An epoxide-modified lipid-polymer may be utilized to deliver the CRISPR-Cas system of the present invention to pulmonary, cardiovascular or renal cells, however, one of skill in the art may adapt the system to deliver to other target organs. Dosage ranging from about 0.05 to about 0.6 mg/kg are envisioned. Dosages over several days or weeks are also envisioned, with a total dosage of about 2 mg/kg.

[0845] In some embodiments, the LNP for deliverting the RNA molecules is prepared by methods known in the art, such as those described in, for example, WO 2005/105152 (PCT/EP2005/004920), WO 2006/069782 (PCT/EP2005/014074), WO 2007/121947 (PCT/EP2007/003496), and WO 2015/082080 (PCT/EP2014/003274), which are herein incorporated by reference. LNPs aimed specifically at the enhanced and improved delivery of siRNA into mammalian cells are described in, for example, Aleku et al., Cancer Res., 68(23): 9788-98 (Dec. 1, 2008), Strumberg et al., Int. J. Clin. Pharmacol. Ther., 50(1): 76-8 (January 2012), Schultheis et al., J. Clin. Oncol., 32(36): 4141-48 (Dec. 20, 2014), and Fehring et al., Mol. Ther., 22(4): 811-20 (Apr. 22, 2014), which are herein incorporated by reference and may be applied to the present technology.

[0846] In some embodiments, the LNP includes any LNP disclosed in WO 2005/105152 (PCT/EP2005/004920), WO 2006/069782 (PCT/EP2005/014074), WO 2007/121947 (PCT/EP2007/003496), and WO 2015/082080 (PCT/EP2014/003274).

[0847] In some embodiments, the LNP includes at least one lipid having Formula I: (Formula I), wherein R1 and R2 are each and independently selected from the group comprising alkyl, n is any integer between 1 and 4, and R3 is an acyl selected from the group comprising lysyl, ornithyl, 2,4-diaminobutyryl, histidyl and an acyl moiety according to Formula II:

[chemical structure]

wherein m is any integer from 1 to 3 and Y⁻ is a pharmaceutically acceptable anion. In some embodiments, a lipid according to Formula I includes at least two asymmetric C atoms. In some embodiments, enantiomers of Formula I include, but are not limited to, R-R; S-S; R—S and S-R enantiomer.

[0848] In some embodiments, R1 is lauryl and R2 is myristyl. In another embodiment, R1 is palmityl and R2 is oleyl. In some embodiments, m is 1 or 2. In some embodiments, Y− is selected from halogenids, acetate or trifluoroacetate.

[0849] In some embodiments, the LNP comprises one or more lipids select from: β-arginyl-2,3-diamino propionic acid-N-palmityl-N-oleyl-amide trihydrochloride (Formula III):

[chemical structure]

β-arginyl-23-diamino propionic acid-N-lauryl-N-myristyl-amide trihydrochloride (Formula IV):

[chemical structure]

and
ε-arginyl-lysine-N-lauryl-N-myristyl-amidetrihydrochloride (Formula V):

[chemical structure]

[0850] In some embodiments, the LNP also includes a constituent. By way o example, but not by way of limitation, in some embodiments, the constituent is selected from peptides, proteins, oligonucleotides, polynucleotides, nucleic acids, or a combination thereof. In some embodiments, the constituent is an antibody, e.g., a monoclonal antibody. In some embodiments, the constituent is a nucleic acid selected from, e.g., ribozymes, aptamers, spiegelmers, DNA, RNA, PNA, LNA, or a combination thereof. In some embodiments, the nucleic acid is guide RNA and/or mRNA.

[0851] In some embodiments, the constituent of the LNP comprises an mRNA encoding a CRIPSR-Cas protein. In some embodiments, the constituent of the LNP comprises an mRNA encoding a Type-II or Type-V CRIPSR-Cas protein. In some embodiments, the constituent of the LNP comprises an mRNA encoding an adenosine deaminase (which may be fused to a CRISPR-Cas protein or an adaptor protein).

[0852] In some embodiments, the constituent of the LNP further comprises one or more guide RNA. In some embodiments, the LNP is configured to deliver the aforementioned mRNA and guide RNA to vascular endothelium. In some embodiments, the LNP is configured to deliver the aforementioned mRNA and guide RNA to pulmonary endothelium. In some embodiments, the LNP is configured to deliver the aforementioned mRNA and guide RNA to liver. In some embodiments, the LNP is configured to deliver the aforementioned mRNA and guide RNA to lung. In some embodiments, the LNP is configured to deliver the aforementioned mRNA and guide RNA to hearts. In some embodiments, the LNP is configured to deliver the aforementioned mRNA and guide RNA to spleen. In some embodiments, the LNP is configured to deliver the aforementioned mRNA and guide RNA to kidney. In some embodiments, the LNP is configured to deliver the aforementioned mRNA and guide RNA to pancrea. In some embodiments, the LNP is configured to deliver the aforementioned mRNA and guide RNA to brain. In some embodiments, the LNP is configured to deliver the aforementioned mRNA and guide RNA to macrophages.

[0853] In some embodiments, the LNP also includes at least one helper lipid. In some embodiments, the helper lipid is selected from phospholipids and steroids. In some embodiments, the phospholipids are di- and/or monoester of the phosphoric acid. In some embodiments, the phospholipids are phosphoglycerides and/or sphingolipids. In some embodiments, the steroids are naturally occurring and/or synthetic compounds based on the partially hydrogenated cyclopenta[a]phenanthrene. In some embodiments, the steroids contain 21 to 30 C atoms. In some embodiments, the steroid is cholesterol. In some embodiments, the helper lipid is selected from 1,2-diphytanoyl-sn-glycero-3-phosphoethanolamine (DPhyPE), ceramide, and 1,2-dioleylsn-glycero-3-phosphoethanolamine (DOPE).

[0854] In some embodiments, the at least one helper lipid comprises a moiety selected from the group comprising a PEG moiety, a HEG moiety, a polyhydroxyethyl starch (polyHES) moiety and a polypropylene moiety. In some embodiments, the moiety has a molecule weight between about 500 to 10,000 Da or between about 2,000 to 5,000 Da. In some embodiments, the PEG moiety is selected from 1,2-distearoyl-sn-glycero-3 phosphoethanolamine, 1,2-dialkyl-sn-glycero-3-phosphoethanolamine, and Ceramide-PEG. In some embodiments, the PEG moiety has a molecular weight between about 500 to 10,000 Da or between about 2,000 to 5,000 Da. In some embodiments, the PEG moiety has a molecular weight of 2,000 Da.

[0855] In some embodiments, the helper lipid is between about 20 mol % to 80 mol % of the total lipid content of the composition. In some embodiments, the helper lipid component is between about 35 mol % to 65 mol % of the total lipid content of the LNP. In some embodiments, the LNP includes lipids at 50 mol % and the helper lipid at 50 mol % of the total lipid content of the LNP.

[0856] In some embodiments, the LNP includes any of β-3-arginyl-2,3-diaminopropionic acid-N-palmityl-N-oleyl-amide trihydrochloride, β-arginyl-2,3-diaminopropionic acid-N-lauryl-N-myristyl-amide trihydrochloride or arginyl-lysine-N-lauryl-N-myristyl-amide trihydrochloride in combination with DPhyPE, wherein the content of DPhyPE is about 80 mol %, 65 mol %, 50 mol % and 35 mol % of the overall lipid content of the LNP. In some embodiments, the LNP includes β-arginyl-2,3-diamino propionic acid-N-pahnityl-N-oleyl-amide trihydrochloride (lipid) and 1,2-diphytanoyl-sn-glycero-3-phosphoethanolamine (helper lipid). In some embodiments, the LNP includes β-arginyl-2,3-diamino propionic acid-N-palmityl-N-oleyl-amide trihydrochloride (lipid), 1,2-diphytanoyl-sn-glycero-3-phosphoethanolamine (first helper lipid), and 1,2-disteroyl-sn-glycero-3-phosphoethanolamine-PEG2000 (second helper lipid).

[0857] In some embodiments, the second helper lipid is between about 0.05 mol % to 4.9 mol % or between about 1 mol % to 3 mol % of the total lipid content. In some embodiments, the LNP includes lipids at between about 45 mol % to 50 mol % of the total lipid content, a first helper lipid between about 45 mol % to 50 mol % of the total lipid content, under the proviso that there is a PEGylated second helper lipid between about 0.1 mol % to 5 mol %, between about 1 mol % to 4 mol %, or at about 2 mol % of the total lipid content, wherein the sum of the content of the lipids, the first helper lipid, and of the second helper lipid is 100 mol % of the total lipid content and wherein the sum of the first helper lipid and the second helper lipid is 50 mol % of the total lipid content. In some embodiments, the LNP comprises: (a) 50 mol % of 0-arginyl-2,3-diamino propionic acid-N-palmityl-N-oleyl-amide trihydrochloride, 48 mol % of 1,2-diphytanoyl-sn-glycero-3-phosphoethanolamine; and 2 mol % 1,2-distearoyl-sn-glycero-3-phosphoethanolamine-PEG2000; or (b) 50 mol % of β-arginyl-2,3-diamino propionic acid-N-palmityl-N-oleyl-amide trihydrocloride, 49 mol % 1,2-diphytanoyl-sn-glycero-3-phosphoethanolamine; and 1 mol % N(Carbonyl-methoxypolyethylenglycol-2000)-1,2-distearoyl-sn-glycero3-phosphoethanolamine, or a sodium salt thereof.

[0858] In some embodiments, the LNP contains a nucleic acid, wherein the charge ratio of nucleic acid backbone phosphates to cationic lipid nitrogen atoms is about 1: 1.5-7 or about 1:4.

[0859] In some embodiments, the LNP also includes a shielding compound, which is removable from the lipid composition under in vivo conditions. In some embodiments, the shielding compound is a biologically inert compound. In some embodiments, the shielding compound does not carry any charge on its surface or on the molecule as such. In some embodiments, the shielding compounds are polyethylenglycoles (PEGs), hydroxyethylglucose (HEG) based polymers, polyhydroxyethyl starch (polyHES) and polypropylene. In some embodiments, the PEG, HEG, polyHES, and a polypropylene weight between about 500 to 10,000 Da or between about 2000 to 5000 Da. In some embodiments, the shielding compound is PEG2000 or PEG5000.

[0860] In some embodiments, the LNP includes at least one lipid, a first helper lipid, and a shielding compound that is removable from the lipid composition under in vivo conditions. In some embodiments, the LNP also includes a second helper lipid. In some embodiments, the first helper lipid is ceramide. In some embodiments, the second helper lipid is ceramide. In some embodiments, the ceramide comprises at least one short carbon chain substituent of from 6 to 10 carbon atoms. In some embodiments, the ceramide comprises 8 carbon atoms. In some embodiments, the shielding compound is attached to a ceramide. In some embodiments, the shielding compound is attached to a ceramide. In some embodiments, the shielding compound is covalently attached to the ceramide. In some embodiments, the shielding compound is attached to a nucleic acid in the LNP. In some embodiments, the shielding compound is covalently attached to the nucleic acid. In some embodiments, the shielding compound is attached to the nucleic acid by a linker. In some embodiments, the linker is cleaved under physiological conditions. In some embodiments, the linker is selected from ssRNA, ssDNA, dsRNA, dsDNA, peptide, S-S-linkers and pH sensitive linkers. In some embodiments, the linker moiety is attached to the 3′ end of the sense strand of the nucleic acid. In some embodiments, the shielding compound comprises a pH-sensitive linker or a pH-sensitive moiety. In some embodiments, the pH-sensitive linker or pH-sensitive moiety is an anionic linker or an anionic moiety. In some embodiments, the anionic linker or anionic moiety is less anionic or neutral in an acidic environment. In some embodiments, the pH-sensitive linker or the pH-sensitive moiety is selected from the oligo (glutamic acid), oligophenolate(s) and diethylene triamine penta acetic acid.

[0861] In any of the LNP embodiments in the previous paragraph, the LNP can have an osmolality between about 50 to 600 mosmole/kg, between about 250 to 350 mosmole/kg, or between about 280 to 320 mosmole/kg, and/or wherein the LNP formed by the lipid and/or one or two helper lipids and the shielding compound have a particle size between about 20 to 200 nm, between about 30 to 100 nm, or between about 40 to 80 nm.

[0862] In some embodiments, the shielding compound provides for a longer circulation time in vivo and allows for a better biodistribution of the nucleic acid containing LNP. In some embodiments, the shielding compound prevents immediate interaction of the LNP with serum compounds or compounds of other bodily fluids or cytoplasma membranes, e.g., cytoplasma membranes of the endothelial lining of the vasculature, into which the LNP is administered. Additionally or alternatively, in some embodiments, the shielding compounds also prevent elements of the immune system from immediately interacting with the LNP. Additionally or alternatively, in some embodiments, the shielding compound acts as an anti-opsonizing compound. Without wishing to be bound by any mechanism or theory, in some embodiments, the shielding compound forms a cover or coat that reduces the surface area of the LNP available for interaction with its environment. Additionally or alternatively, in some embodiments, the shielding compound shields the overall charge of the LNP.

[0863] In another embodiment, the LNP includes at least one cationic lipid having Formula VI:

[chemical structure]

wherein n is 1, 2, 3, or 4, wherein m is 1, 2, or 3, wherein Y⁻ is anion, wherein each of R¹ and R² is individually and independently selected from the group consisting of linear C12-C18 alkyl and linear C12-C18 alkenyl, a sterol compound, wherein the sterol compound is selected from the group consisting of cholesterol and stigmasterol, and a PEGylated lipid, wherein the PEGylated lipid comprises a PEG moiety, wherein the PEGylated lipid is selected from the group consisting of:
a PEGylated phosphoethanolamine of Formula VII:

[chemical structure]

wherein R³ and R⁴ are individually and independently linear C13-C17 alkyl, and p is any integer between 15 to 130;
a PEGylated ceramide of Formula VIII:

[chemical structure]

wherein R is linear C7-C15 alkyl, and q is any number between 15 to 130; and
a PEGylated diacylglycerol of Formula IX:

[chemical structure]

wherein each of R and R is individually and independently linear C11-C17 alkyl, and r is any integer from 15 to 130.

[0864] In some embodiments, R¹ and R² are different from each other. In some embodiments, R¹ is palmityl and R² is oleyl. In some embodiments, R¹ is lauryl and R² is myristyl. In some embodiments, R¹ and R² are the same. In some embodiments, each of R¹ and R² is individually and independently selected from the group consisting of C12 alkyl, C14 alkyl, C16 alkyl, C18 alkyl, C12 alkenyl, C14 alkenyl, C16 alkenyl and C18 alkenyl. In some embodiments, each of C12 alkenyl, C14 alkenyl, C16 alkenyl and C18 alkenyl comprises one or two double bonds. In some embodiments, C18 alkenyl is C18 alkenyl with one double bond between C9 and C10. In some embodiments, C18 alkenyl is cis-9-octadecyl.

[0865] In some embodiments, the cationic lipid is a compound of Formula X:

[chemical structure]

In some embodiments, Y⁻ is selected from halogenids, acetate and trifluoroacetate. In some embodiments, the cationic lipid is β-arginyl-2,3-diamino propionic acid-N-palmityl-N-oleyl-amide trihydrochloride of Formula III:

[chemical structure]

In some embodiments, the cationic lipid is β-arginyl-2,3-diamino propionic acid-N-lauryl-N-myristyl-amide trihydrochloride of Formula IV:

[chemical structure]

In some embodiments, the cationic lipid is arginyl-lysine-N-lauryl-N-myristyl-amide trihydrochloride of Formula V:

[chemical structure]

[0866] In some embodiments, the sterol compound is cholesterol. In some embodiments, the sterol compound is stigmasterin.

[0867] In some embodiments, the PEG moiety of the PEGylated lipid has a molecular weight from about 800 to 5,000 Da. In some embodiments, the molecular weight of the PEG moiety of the PEGylated lipid is about 800 Da. In some embodiments, the molecular weight of the PEG moiety of the PEGylated lipid is about 2,000 Da. In some embodiments, the molecular weight of the PEG moiety of the PEGylated lipid is about 5,000 Da. In some embodiments, the PEGylated lipid is a PEGylated phosphoethanolamine of Formula VII, wherein each of R³ and R⁴ is individually and independently linear C13-C17 alkyl, and p is any integer from 18, 19 or 20, or from 44, 45 or 46 or from 113, 114 or 115. In some embodiments, R³ and R⁴ are the same. In some embodiments, R³ and R⁴ are different. In some embodiments, each of R³ and R⁴ is individually and independently selected from the group consisting of C13 alkyl, C15 alkyl and C17 alkyl. In some embodiments, the PEGylated phosphoethanolamine of Formula VII is 1,2-distearoyl-sn-glycero-3-phosphoethanolamine-N-[methoxy(polyethylene glycol)-2000](ammonium salt):

[chemical structure]

In some embodiments, the PEGylated phosphoethanolamine of Formula VII is 1,2-distearoyl-sn-glycero-3-phosphoethanolamine-N-[methoxy(polyethylene glycol)-5000](ammonium salt):

[chemical structure]

In some embodiments, the PEGylated lipid is a PEGylated ceramide of Formula VIII, wherein R⁵ is linear C7-C15 alkyl, and q is any integer from 18, 19 or 20, or from 44, 45 or 46 or from 113, 114 or 115. In some embodiments, R⁵ is linear C7 alkyl. In some embodiments, R⁵ is linear C15 alkyl. In some embodiments, the PEGylated ceramide of Formula VIII is N-octanoyl-sphingosine-1-{succinyl[methoxy(polyethylene glycol)2000]}:

[chemical structure]

In some embodiments, the PEGylated ceramide of Formula VIII is N-palmitoyl-sphingosine-1-{succinyl[methoxy(polyethylene glycol)2000]}

[chemical structure]

In some embodiments, the PEGylated lipid is a PEGylated diacylglycerol of Formula IX, wherein each of R⁶ and R⁷ is individually and independently linear C-C17 alkyl, and r is any integer from 18, 19 or 20, or from 44, 45 or 46 or from 113, 114 or 115. In some embodiments, R⁶ and R⁷ are the same. In some embodiments, R⁶ and R⁷ are different. In some embodiments, each of R⁶ and R⁷ is individually and independently selected from the group consisting of linear C17 alkyl, linear C15 alkyl and linear C13 alkyl. In some embodiments, the PEGylated diacylglycerol of Formula IX 1,2-Distearoyl-sn-glycerol [methoxy(polyethylene glycol)2000]:

[chemical structure]

In some embodiments, the PEGylated diacylglycerol of Formula IX is 1,2-Dipalmitoyl-sn-glycerol [methoxy(polyethylene glycol)2000]:

[chemical structure]

In some embodiments, the PEGylated diacylglycerol of Formula IX is:

[chemical structure]

In some embodiments, the LNP includes at least one cationic lipid selected from Formulas III, IV, and V, at least one sterol compound selected from a cholesterol and stigmasterin, and wherein the PEGylated lipid is at least one selected from Formulas XIII and XIV. In some embodiments, the LNP includes at least one cationic lipid selected from Formulas III, IV, and V, at least one sterol compound selected from a cholesterol and stigmasterin, and wherein the PEGylated lipid is at least one selected from Formulas XV and XVI. In some embodiments, the LNP includes a cationic lipid of Formula III, a cholesterol as the sterol compound, and wherein the PEGylated lipid is Formula XI.

[0868] In any of the LNP embodiments in the previous paragraph, wherein the content of the cationic lipid composition is between about 65 mole % to 75 mole %, the content of the sterol compound is between about 24 mole % to 34 mole % and the content of the PEGylated lipid is between about 0.5 mole % to 1.5 mole %, wherein the sum of the content of the cationic lipid, of the sterol compound and of the PEGylated lipid for the lipid composition is 100 mole %. In some embodiments, the cationic lipid is about 70 mole %, the content of the sterol compound is about 29 mole % and the content of the PEGylated lipid is about 1 mole %. In some embodiments, the LNP is 70 mole % of Formula III, 29 mole % of cholesterol, and 1 mole % of Formula XI.

[0869] Exosomes

[0870] Exosomes are endogenous nano-vesicles that transport RNAs and proteins, and which can deliver RNA to the brain and other target organs. To reduce immunogenicity, Alvarez-Erviti et al. (2011, Nat Biotechnol 29: 341) used self-derived dendritic cells for exosome production. Targeting to the brain was achieved by engineering the dendritic cells to express Lamp2b, an exosomal membrane protein, fused to the neuron-specific RVG peptide. Purified exosomes were loaded with exogenous RNA by electroporation. Intravenously injected RVG-targeted exosomes delivered GAPDH siRNA specifically to neurons, microglia, oligodendrocytes in the brain, resulting in a specific gene knockdown. Pre-exposure to RVG exosomes did not attenuate knockdown, and non-specific uptake in other tissues was not observed. The therapeutic potential of exosome-mediated siRNA delivery was demonstrated by the strong mRNA (60%) and protein (62%) knockdown of BACE1, a therapeutic target in Alzheimer's disease.

[0871] To obtain a pool of immunologically inert exosomes, Alvarez-Erviti et al. harvested bone marrow from inbred C57BL/6 mice with a homogenous major histocompatibility complex (MHC) haplotype. As immature dendritic cells produce large quantities of exosomes devoid of T-cell activators such as MHC-II and CD86, Alvarez-Erviti et al. selected for dendritic cells with granulocyte/macrophage-colony stimulating factor (GM-CSF) for 7 d. Exosomes were purified from the culture supernatant the following day using well-established ultracentrifugation protocols. The exosomes produced were physically homogenous, with a size distribution peaking at 80 nm in diameter as determined by nanoparticle tracking analysis (NTA) and electron microscopy. Alvarez-Erviti et al. obtained 6-12 μg of exosomes (measured based on protein concentration) per 106 cells.

[0872] Next, Alvarez-Erviti et al. investigated the possibility of loading modified exosomes with exogenous cargoes using electroporation protocols adapted for nanoscale applications. As electroporation for membrane particles at the nanometer scale is not well-characterized, nonspecific Cy5-labeled RNA was used for the empirical optimization of the electroporation protocol. The amount of encapsulated RNA was assayed after ultracentrifugation and lysis of exosomes. Electroporation at 400 V and 125 μF resulted in the greatest retention of RNA and was used for all subsequent experiments.

[0873] Alvarez-Erviti et al. administered 150 μg of each BACE1 siRNA encapsulated in 150 μg of RVG exosomes to normal C57BL/6 mice and compared the knockdown efficiency to four controls: untreated mice, mice injected with RVG exosomes only, mice injected with BACE1 siRNA complexed to an in vivo cationic liposome reagent and mice injected with BACE1 siRNA complexed to RVG-9R, the RVG peptide conjugated to 9 D-arginines that electrostatically binds to the siRNA. Cortical tissue samples were analyzed 3 d after administration and a significant protein knockdown (45%, P<0.05, versus 62%, P<0.01) in both siRNA-RVG-9R-treated and siRNARVG exosome-treated mice was observed, resulting from a significant decrease in BACE1 mRNA levels (66% [+ or −] 15%, P<0.001 and 61% [+ or −] 13% respectively, P<0.01). Moreover, Applicants demonstrated a significant decrease (55%, P<0.05) in the total [beta]-amyloid 1-42 levels, a main component of the amyloid plaques in Alzheimer's pathology, in the RVG-exosome-treated animals. The decrease observed was greater than the 0-amyloid 1-40 decrease demonstrated in normal mice after intraventricular injection of BACE1 inhibitors. Alvarez-Erviti et al. carried out 5′-rapid amplification of cDNA ends (RACE) on BACE1 cleavage product, which provided evidence of RNAi-mediated knockdown by the siRNA.

[0874] Finally, Alvarez-Erviti et al. investigated whether RNA-RVG exosomes induced immune responses in vivo by assessing IL-6, IP-10, TNFα and IFN-α serum concentrations. Following exosome treatment, nonsignificant changes in all cytokines were registered similar to siRNA-transfection reagent treatment in contrast to siRNA-RVG-9R, which potently stimulated IL-6 secretion, confirming the immunologically inert profile of the exosome treatment. Given that exosomes encapsulate only 20% of siRNA, delivery with RVG-exosome appears to be more efficient than RVG-9R delivery as comparable mRNA knockdown and greater protein knockdown was achieved with fivefold less siRNA without the corresponding level of immune stimulation. This experiment demonstrated the therapeutic potential of RVG-exosome technology, which is potentially suited for long-term silencing of genes related to neurodegenerative diseases. The exosome delivery system of Alvarez-Erviti et al. may be applied to deliver the AD-functionalized CRISPR-Cas system of the present invention to therapeutic targets, especially neurodegenerative diseases. A dosage of about 100 to 1000 mg of CRISPR Cas encapsulated in about 100 to 1000 mg of RVG exosomes may be contemplated for the present invention.

[0875] El-Andaloussi et al. (Nature Protocols 7, 2112-2126(2012)) discloses how exosomes derived from cultured cells can be harnessed for delivery of RNA in vitro and in vivo. This protocol first describes the generation of targeted exosomes through transfection of an expression vector, comprising an exosomal protein fused with a peptide ligand. Next, El-Andaloussi et al. explain how to purify and characterize exosomes from transfected cell supernatant. Next, El-Andaloussi et al. detail crucial steps for loading RNA into exosomes. Finally, El-Andaloussi et al. outline how to use exosomes to efficiently deliver RNA in vitro and in vivo in mouse brain. Examples of anticipated results in which exosome-mediated RNA delivery is evaluated by functional assays and imaging are also provided. The entire protocol takes ˜3 weeks. Delivery or administration according to the invention may be performed using exosomes produced from self-derived dendritic cells. From the herein teachings, this can be employed in the practice of the invention.

[0876] In another embodiment, the plasma exosomes of Wahlgren et al. (Nucleic Acids Research, 2012, Vol. 40, No. 17 e130) are contemplated. Exosomes are nano-sized vesicles (30-90 nm in size) produced by many cell types, including dendritic cells (DC), B cells, T cells, mast cells, epithelial cells and tumor cells. These vesicles are formed by inward budding of late endosomes and are then released to the extracellular environment upon fusion with the plasma membrane. Because exosomes naturally carry RNA between cells, this property may be useful in gene therapy, and from this disclosure can be employed in the practice of the instant invention.

[0877] Exosomes from plasma can be prepared by centrifugation of buffy coat at 900 g for 20 min to isolate the plasma followed by harvesting cell supernatants, centrifuging at 300 g for 10 min to eliminate cells and at 16 500 g for 30 min followed by filtration through a 0.22 mm filter. Exosomes are pelleted by ultracentrifugation at 120 000 g for 70 min. Chemical transfection of siRNA into exosomes is carried out according to the manufacturer's instructions in RNAi Human/Mouse Starter Kit (Quiagen, Hilden, Germany). siRNA is added to 100 ml PBS at a final concentration of 2 mmol/ml. After adding HiPerFect transfection reagent, the mixture is incubated for 10 min at RT. In order to remove the excess of micelles, the exosomes are re-isolated using aldehyde/sulfate latex beads. The chemical transfection of CRISPR Cas into exosomes may be conducted similarly to siRNA. The exosomes may be co-cultured with monocytes and lymphocytes isolated from the peripheral blood of healthy donors. Therefore, it may be contemplated that exosomes containing CRISPR Cas may be introduced to monocytes and lymphocytes of and autologously reintroduced into a human. Accordingly, delivery or administration according to the invention may be performed using plasma exosomes.

[0878] Liposomes

[0879] Delivery or administration according to the invention can be performed with liposomes. Liposomes are spherical vesicle structures composed of a uni- or multilamellar lipid bilayer surrounding internal aqueous compartments and a relatively impermeable outer lipophilic phospholipid bilayer. Liposomes have gained considerable attention as drug delivery carriers because they are biocompatible, nontoxic, can deliver both hydrophilic and lipophilic drug molecules, protect their cargo from degradation by plasma enzymes, and transport their load across biological membranes and the blood brain barrier (BBB) (see, e.g., Spuch and Navarro, Journal of Drug Delivery, vol. 2011, Article ID 469679, 12 pages, 2011. doi:10.1155/2011/469679 for review).

[0880] Liposomes can be made from several different types of lipids; however, phospholipids are most commonly used to generate liposomes as drug carriers. Although liposome formation is spontaneous when a lipid film is mixed with an aqueous solution, it can also be expedited by applying force in the form of shaking by using a homogenizer, sonicator, or an extrusion apparatus (see, e.g., Spuch and Navarro, Journal of Drug Delivery, vol. 2011, Article ID 469679, 12 pages, 2011. doi:10.1155/2011/469679 for review).

[0881] Several other additives may be added to liposomes in order to modify their structure and properties. For instance, either cholesterol or sphingomyelin may be added to the liposomal mixture in order to help stabilize the liposomal structure and to prevent the leakage of the liposomal inner cargo. Further, liposomes are prepared from hydrogenated egg phosphatidylcholine or egg phosphatidylcholine, cholesterol, and dicetyl phosphate, and their mean vesicle sizes were adjusted to about 50 and 100 nm. (see, e.g., Spuch and Navarro, Journal of Drug Delivery, vol. 2011, Article ID 469679, 12 pages, 2011. doi:10.1155/2011/469679 for review).

[0882] A liposome formulation may be mainly comprised of natural phospholipids and lipids such as 1,2-distearoryl-sn-glycero-3-phosphatidyl choline (DSPC), sphingomyelin, egg phosphatidylcholines and monosialoganglioside. Since this formulation is made up of phospholipids only, liposomal formulations have encountered many challenges, one of the ones being the instability in plasma. Several attempts to overcome these challenges have been made, specifically in the manipulation of the lipid membrane. One of these attempts focused on the manipulation of cholesterol. Addition of cholesterol to conventional formulations reduces rapid release of the encapsulated bioactive compound into the plasma or 1,2-dioleoyl-sn-glycero-3-phosphoethanolamine (DOPE) increases the stability (see, e.g., Spuch and Navarro, Journal of Drug Delivery, vol. 2011, Article ID 469679, 12 pages, 2011. doi:10.1155/2011/469679 for review).

[0883] In a particularly advantageous embodiment, Trojan Horse liposomes (also known as Molecular Trojan Horses) are desirable and protocols may be found at http://cshprotocols.cshlp.org/content/2010/4/pdb.prot5407.long. These particles allow delivery of a transgene to the entire brain after an intravascular injection. Without being bound by limitation, it is believed that neutral lipid particles with specific antibodies conjugated to surface allow crossing of the blood brain barrier via endocytosis. Trojan Horse Liposomes may be used to deliver the CRISPR family of nucleases to the brain via an intravascular injection, which would allow whole brain transgenic animals without the need for embryonic manipulation. About 1-5 g of DNA or RNA may be contemplated for in vivo administration in liposomes.

[0884] In another embodiment, the AD-functionalized CRISPR Cas system or components thereof may be administered in liposomes, such as a stable nucleic-acid-lipid particle (SNALP) (see, e.g., Morrissey et al., Nature Biotechnology, Vol. 23, No. 8, August 2005). Daily intravenous injections of about 1, 3 or 5 mg/kg/day of a specific CRISPR Cas targeted in a SNALP are contemplated. The daily treatment may be over about three days and then weekly for about five weeks. In another embodiment, a specific CRISPR Cas encapsulated SNALP) administered by intravenous injection to at doses of about 1 or 2.5 mg/kg are also contemplated (see, e.g., Zimmerman et al., Nature Letters, Vol. 441, 4 May 2006). The SNALP formulation may contain the lipids 3-N-[(wmethoxypoly(ethylene glycol) 2000) carbamoyl]-1,2-dimyristyloxy-propylamine (PEG-C-DMA),1,2-dilinoleyloxy-N,N-dimethyl-3-aminopropane (DLinDMA), 1,2-distearoyl-sn-glycero-3-phosphocholine (DSPC) and cholesterol, in a 2:40:10:48 molar percent ratio (see, e.g., Zimmerman et al., Nature Letters, Vol. 441, 4 May 2006).

[0885] In another embodiment, stable nucleic-acid-lipid particles (SNALPs) have proven to be effective delivery molecules to highly vascularized HepG2-derived liver tumors but not in poorly vascularized HCT-116 derived liver tumors (see, e.g., Li, Gene Therapy (2012) 19, 775-780). The SNALP liposomes may be prepared by formulating D-Lin-DMA and PEG-C-DMA with distearoylphosphatidylcholine (DSPC), Cholesterol and siRNA using a 25:1 lipid/siRNA ratio and a 48/40/10/2 molar ratio of Cholesterol/D-Lin-DMA/DSPC/PEG-C-DMA. The resulted SNALP liposomes are about 80-100 nm in size.

[0886] In yet another embodiment, a SNALP may comprise synthetic cholesterol (Sigma-Aldrich, St Louis, Mo., USA), dipalmitoylphosphatidylcholine (Avanti Polar Lipids, Alabaster, Ala., USA), 3-N-[(w-methoxy poly(ethylene glycol)2000)carbamoyl]-1,2-dimyrestyloxypropylamine, and cationic 1,2-dilinoleyloxy-3-N,Ndimethylaminopropane (see, e.g., Geisbert et al., Lancet 2010; 375: 1896-905). A dosage of about 2 mg/kg total CRISPR Cas per dose administered as, for example, a bolus intravenous infusion may be contemplated.

[0887] In yet another embodiment, a SNALP may comprise synthetic cholesterol (Sigma-Aldrich), 1,2-distearoyl-sn-glycero-3-phosphocholine (DSPC; Avanti Polar Lipids Inc.), PEG-cDMA, and 1,2-dilinoleyloxy-3-(N;N-dimethyl)aminopropane (DLinDMA) (see, e.g., Judge, J. Clin. Invest. 119:661-673 (2009)). Formulations used for in vivo studies may comprise a final lipid/RNA mass ratio of about 9:1.

[0888] The safety profile of RNAi nanomedicines has been reviewed by Barros and Gollob of Alnylam Pharmaceuticals (see, e.g., Advanced Drug Delivery Reviews 64 (2012) 1730-1737). The stable nucleic acid lipid particle (SNALP) is comprised of four different lipids an ionizable lipid (DLinDMA) that is cationic at low pH, a neutral helper lipid, cholesterol, and a diffusible polyethylene glycol (PEG)-lipid. The particle is approximately 80 nm in diameter and is charge-neutral at physiologic pH. During formulation, the ionizable lipid serves to condense lipid with the anionic RNA during particle formation. When positively charged under increasingly acidic endosomal conditions, the ionizable lipid also mediates the fusion of SNALP with the endosomal membrane enabling release of RNA into the cytoplasm. The PEG-lipid stabilizes the particle and reduces aggregation during formulation, and subsequently provides a neutral hydrophilic exterior that improves pharmacokinetic properties.

[0889] To date, two clinical programs have been initiated using SNALP formulations with RNA. Tekmira Pharmaceuticals recently completed a phase I single-dose study of SNALP-ApoB in adult volunteers with elevated LDL cholesterol. ApoB is predominantly expressed in the liver and jejunum and is essential for the assembly and secretion of VLDL and LDL. Seventeen subjects received a single dose of SNALP-ApoB (dose escalation across 7 dose levels). There was no evidence of liver toxicity (anticipated as the potential dose-limiting toxicity based on preclinical studies). One (of two) subjects at the highest dose experienced flu-like symptoms consistent with immune system stimulation, and the decision was made to conclude the trial.

[0890] Alnylam Pharmaceuticals has similarly advanced ALN-TTR01, which employs the SNALP technology described above and targets hepatocyte production of both mutant and wild-type TTR to treat TTR amyloidosis (ATTR). Three ATTR syndromes have been described: familial amyloidotic polyneuropathy (FAP) and familial amyloidotic cardiomyopathy (FAC)—both caused by autosomal dominant mutations in TTR; and senile systemic amyloidosis (SSA) cause by wildtype TTR. A placebo-controlled, single dose-escalation phase I trial of ALN-TTR01 was recently completed in patients with ATTR. ALN-TTR01 was administered as a 15-minute IV infusion to 31 patients (23 with study drug and 8 with placebo) within a dose range of 0.01 to 1.0 mg/kg (based on siRNA). Treatment was well tolerated with no significant increases in liver function tests. Infusion-related reactions were noted in 3 of 23 patients at ≥0.4 mg/kg; all responded to slowing of the infusion rate and all continued on study. Minimal and transient elevations of serum cytokines IL-6, IP-10 and IL-Ira were noted in two patients at the highest dose of 1 mg/kg (as anticipated from preclinical and NHP studies). Lowering of serum TTR, the expected pharmacodynamics effect of ALN-TTR01, was observed at 1 mg/kg.

[0891] In yet another embodiment, a SNALP may be made by solubilizing a cationic lipid, DSPC, cholesterol and PEG-lipid e.g., in ethanol, e.g., at a molar ratio of 40:10:40:10, respectively (see, Semple et al., Nature Niotechnology, Volume 28 Number 2 Feb. 2010, pp. 172-177). The lipid mixture was added to an aqueous buffer (50 mM citrate, pH 4) with mixing to a final ethanol and lipid concentration of 30% (vol/vol) and 6.1 mg/ml, respectively, and allowed to equilibrate at 22° C. for 2 min before extrusion. The hydrated lipids were extruded through two stacked 80 nm pore-sized filters (Nuclepore) at 22° C. using a Lipex Extruder (Northern Lipids) until a vesicle diameter of 70-90 nm, as determined by dynamic light scattering analysis, was obtained. This generally required 1-3 passes. The siRNA (solubilized in a 50 mM citrate, pH 4 aqueous solution containing 30% ethanol) was added to the pre-equilibrated (35° C.) vesicles at a rate of ˜5 ml/min with mixing. After a final target siRNA/lipid ratio of 0.06 (wt/wt) was reached, the mixture was incubated for a further 30 min at 35° C. to allow vesicle reorganization and encapsulation of the siRNA. The ethanol was then removed and the external buffer replaced with PBS (155 mM NaCl, 3 mM Na2HPO4, 1 mM KH2PO4, pH 7.5) by either dialysis or tangential flow diafiltration. siRNA were encapsulated in SNALP using a controlled step-wise dilution method process. The lipid constituents of KC2-SNALP were DLin-KC2-DMA (cationic lipid), dipalmitoylphosphatidylcholine (DPPC; Avanti Polar Lipids), synthetic cholesterol (Sigma) and PEG-C-DMA used at a molar ratio of 57.1:7.1:34.3:1.4. Upon formation of the loaded particles, SNALP were dialyzed against PBS and filter sterilized through a 0.2 m filter before use. Mean particle sizes were 75-85 nm and 90-95% of the siRNA was encapsulated within the lipid particles. The final siRNA/lipid ratio in formulations used for in vivo testing was ˜0.15 (wt/wt). LNP-siRNA systems containing Factor VII siRNA were diluted to the appropriate concentrations in sterile PBS immediately before use and the formulations were administered intravenously through the lateral tail vein in a total volume of 10 ml/kg. This method and these delivery systems may be extrapolated to the AD-functionalized CRISPR Cas system of the present invention.

[0892] Other Lipids

[0893] Other cationic lipids, such as amino lipid 2,2-dilinoleyl-4-dimethylaminoethyl-[1,3]-dioxolane (DLin-KC2-DMA) may be utilized to encapsulate CRISPR Cas or components thereof or nucleic acid molecule(s) coding therefor e.g., similar to SiRNA (see, e.g., Jayaraman, Angew. Chem. Int. Ed. 2012, 51, 8529-8533), and hence may be employed in the practice of the invention. A preformed vesicle with the following lipid composition may be contemplated: amino lipid, distearoylphosphatidylcholine (DSPC), cholesterol and (R)-2,3-bis(octadecyloxy) propyl-1-(methoxy poly(ethylene glycol)2000)propylcarbamate (PEG-lipid) in the molar ratio 40/10/40/10, respectively, and a FVII siRNA/total lipid ratio of approximately 0.05 (w/w). To ensure a narrow particle size distribution in the range of 70-90 nm and a low polydispersity index of 0.11+0.04 (n=56), the particles may be extruded up to three times through 80 nm membranes prior to adding the guide RNA. Particles containing the highly potent amino lipid 16 may be used, in which the molar ratio of the four lipid components 16, DSPC, cholesterol and PEG-lipid (50/10/38.5/1.5) which may be further optimized to enhance in vivo activity.

[0894] Michael S D Kormann et al. (“Expression of therapeutic proteins after delivery of chemically modified mRNA in mice: Nature Biotechnology, Volume:29, Pages: 154-157 (2011)) describes the use of lipid envelopes to deliver RNA. Use of lipid envelopes is also preferred in the present invention.

[0895] In another embodiment, lipids may be formulated with the AD-functionalized CRISPR Cas system of the present invention or component(s) thereof or nucleic acid molecule(s) coding therefor to form lipid nanoparticles (LNPs). Lipids include, but are not limited to, DLin-KC2-DMA4, C12-200 and colipids disteroylphosphatidyl choline, cholesterol, and PEG-DMG may be formulated with CRISPR Cas instead of siRNA (see, e.g., Novobrantseva, Molecular Therapy-Nucleic Acids (2012) 1, e4; doi:10.1038/mtna.2011.3) using a spontaneous vesicle formation procedure. The component molar ratio may be about 50/10/38.5/1.5 (DLin-KC2-DMA or C12-200/disteroylphosphatidyl choline/cholesterol/PEG-DMG). The final lipid:siRNA weight ratio may be ˜12:1 and 9:1 in the case of DLin-KC2-DMA and C12-200 lipid nanoparticles (LNPs), respectively. The formulations may have mean particle diameters of ˜80 nm with >90% entrapment efficiency. A 3 mg/kg dose may be contemplated.

[0896] Tekmira has a portfolio of approximately 95 patent families, in the U.S. and abroad, that are directed to various aspects of LNPs and LNP formulations (see, e.g., U.S. Pat. Nos. 7,982,027; 7,799,565; 8,058,069; 8,283,333; 7,901,708; 7,745,651; 7,803,397; 8,101,741; 8,188,263; 7,915,399; 8,236,943 and 7,838,658 and European Pat. Nos 1766035; 1519714; 1781593 and 1664316), all of which may be used and/or adapted to the present invention.

[0897] The AD-functionalized CRISPR Cas system or components thereof or nucleic acid molecule(s) coding therefor may be delivered encapsulated in PLGA Microspheres such as that further described in US published applications 20130252281 and 20130245107 and 20130244279 (assigned to Moderna Therapeutics) which relate to aspects of formulation of compositions comprising modified nucleic acid molecules which may encode a protein, a protein precursor, or a partially or fully processed form of the protein or a protein precursor. The formulation may have a molar ratio 50:10:38.5:1.5-3.0 (cationic lipid:fusogenic lipid:cholesterol:PEG lipid). The PEG lipid may be selected from, but is not limited to PEG-c-DOMG, PEG-DMG. The fusogenic lipid may be DSPC. See also, Schrum et al., Delivery and Formulation of Engineered Nucleic Acids, US published application 20120251618.

[0898] Nanomerics' technology addresses bioavailability challenges for a broad range of therapeutics, including low molecular weight hydrophobic drugs, peptides, and nucleic acid based therapeutics (plasmid, siRNA, miRNA). Specific administration routes for which the technology has demonstrated clear advantages include the oral route, transport across the blood-brain-barrier, delivery to solid tumours, as well as to the eye. See, e.g., Mazza et al., 2013, ACS Nano. 2013 Feb. 26; 7(2):1016-26; Uchegbu and Siew, 2013, J Pharm Sci. 102(2):305-10 and Lalatsa et al., 2012, J Control Release. 2012 Jul. 20; 161(2):523-36.

[0899] US Patent Publication No. 20050019923 describes cationic dendrimers for delivering bioactive molecules, such as polynucleotide molecules, peptides and polypeptides and/or pharmaceutical agents, to a mammalian body. The dendrimers are suitable for targeting the delivery of the bioactive molecules to, for example, the liver, spleen, lung, kidney or heart (or even the brain). Dendrimers are synthetic 3-dimensional macromolecules that are prepared in a step-wise fashion from simple branched monomer units, the nature and functionality of which can be easily controlled and varied. Dendrimers are synthesised from the repeated addition of building blocks to a multifunctional core (divergent approach to synthesis), or towards a multifunctional core (convergent approach to synthesis) and each addition of a 3-dimensional shell of building blocks leads to the formation of a higher generation of the dendrimers. Polypropylenimine dendrimers start from a diaminobutane core to which is added twice the number of amino groups by a double Michael addition of acrylonitrile to the primary amines followed by the hydrogenation of the nitriles. This results in a doubling of the amino groups. Polypropylenimine dendrimers contain 100% protonable nitrogens and up to 64 terminal amino groups (generation 5, DAB 64). Protonable groups are usually amine groups which are able to accept protons at neutral pH. The use of dendrimers as gene delivery agents has largely focused on the use of the polyamidoamine. and phosphorous containing compounds with a mixture of amine/amide or N—P(02)S as the conjugating units respectively with no work being reported on the use of the lower generation polypropylenimine dendrimers for gene delivery. Polypropylenimine dendrimers have also been studied as pH sensitive controlled release systems for drug delivery and for their encapsulation of guest molecules when chemically modified by peripheral amino acid groups. The cytotoxicity and interaction of polypropylenimine dendrimers with DNA as well as the transfection efficacy of DAB 64 has also been studied.

[0900] US Patent Publication No. 20050019923 is based upon the observation that, contrary to earlier reports, cationic dendrimers, such as polypropylenimine dendrimers, display suitable properties, such as specific targeting and low toxicity, for use in the targeted delivery of bioactive molecules, such as genetic material. In addition, derivatives of the cationic dendrimer also display suitable properties for the targeted delivery of bioactive molecules. See also, Bioactive Polymers, US published application 20080267903, which discloses “Various polymers, including cationic polyamine polymers and dendrimeric polymers, are shown to possess anti-proliferative activity, and may therefore be useful for treatment of disorders characterised by undesirable cellular proliferation such as neoplasms and tumours, inflammatory disorders (including autoimmune disorders), psoriasis and atherosclerosis. The polymers may be used alone as active agents, or as delivery vehicles for other therapeutic agents, such as drug molecules or nucleic acids for gene therapy. In such cases, the polymers' own intrinsic anti-tumour activity may complement the activity of the agent to be delivered.” The disclosures of these patent publications may be employed in conjunction with herein teachings for delivery of AD-functionalized CRISPR Cas system(s) or component(s) thereof or nucleic acid molecule(s) coding therefor.

[0901] Supercharged Proteins

[0902] Supercharged proteins are a class of engineered or naturally occurring proteins with unusually high positive or negative net theoretical charge and may be employed in delivery of AD-functionalized CRISPR Cas system(s) or component(s) thereof or nucleic acid molecule(s) coding therefor. Both supernegatively and superpositively charged proteins exhibit a remarkable ability to withstand thermally or chemically induced aggregation. Superpositively charged proteins are also able to penetrate mammalian cells. Associating cargo with these proteins, such as plasmid DNA, RNA, or other proteins, can enable the functional delivery of these macromolecules into mammalian cells both in vitro and in vivo. The creation and characterization of supercharged proteins has been reported in 2007 (Lawrence et al., 2007, Journal of the American Chemical Society 129, 10110-10112).

[0903] The nonviral delivery of RNA and plasmid DNA into mammalian cells are valuable both for research and therapeutic applications (Akinc et al., 2010, Nat. Biotech. 26, 561-569). Purified +36 GFP protein (or other superpositively charged protein) is mixed with RNAs in the appropriate serum-free media and allowed to complex prior addition to cells. Inclusion of serum at this stage inhibits formation of the supercharged protein-RNA complexes and reduces the effectiveness of the treatment. The following protocol has been found to be effective for a variety of cell lines (McNaughton et al., 2009, Proc. Natl. Acad. Sci. USA 106, 6111-6116) (However, pilot experiments varying the dose of protein and RNA should be performed to optimize the procedure for specific cell lines): (1) One day before treatment, plate 1×105 cells per well in a 48-well plate. (2) On the day of treatment, dilute purified +36 GFP protein in serumfree media to a final concentration 200 nM. Add RNA to a final concentration of 50 nM. Vortex to mix and incubate at room temperature for 10 min. (3) During incubation, aspirate media from cells and wash once with PBS. (4) Following incubation of +36 GFP and RNA, add the protein-RNA complexes to cells. (5) Incubate cells with complexes at 37° C. for 4h. (6) Following incubation, aspirate the media and wash three times with 20 U/mL heparin PBS. Incubate cells with serum-containing media for a further 48h or longer depending upon the assay for activity. (7) Analyze cells by immunoblot, qPCR, phenotypic assay, or other appropriate method.

[0904] It has been further found +36 GFP to be an effective plasmid delivery reagent in a range of cells. As plasmid DNA is a larger cargo than siRNA, proportionately more +36 GFP protein is required to effectively complex plasmids. For effective plasmid delivery Applicants have developed a variant of +36 GFP bearing a C-terminal HA2 peptide tag, a known endosome-disrupting peptide derived from the influenza virus hemagglutinin protein. The following protocol has been effective in a variety of cells, but as above it is advised that plasmid DNA and supercharged protein doses be optimized for specific cell lines and delivery applications: (1) One day before treatment, plate 1×105 per well in a 48-well plate. (2) On the day of treatment, dilute purified 36 GFP protein in serumfree media to a final concentration 2 mM. Add 1 mg of plasmid DNA. Vortex to mix and incubate at room temperature for 10 min. (3) During incubation, aspirate media from cells and wash once with PBS. (4) Following incubation of 36 GFP and plasmid DNA, gently add the protein-DNA complexes to cells. (5) Incubate cells with complexes at 37 C for 4h. (6) Following incubation, aspirate the media and wash with PBS. Incubate cells in serum-containing media and incubate for a further 24-48h. (7) Analyze plasmid delivery (e.g., by plasmid-driven gene expression) as appropriate.

[0905] See also, e.g., McNaughton et al., Proc. Natl. Acad. Sci. USA 106, 6111-6116 (2009); Cronican et al., ACS Chemical Biology 5, 747-752 (2010); Cronican et al., Chemistry & Biology 18, 833-838 (2011); Thompson et al., Methods in Enzymology 503, 293-319 (2012); Thompson, D. B., et al., Chemistry & Biology 19 (7), 831-843 (2012). The methods of the super charged proteins may be used and/or adapted for delivery of the AD-functionalized CRISPR Cas system of the present invention. These systems in conjunction with herein teaching can be employed in the delivery of AD-functionalized CRISPR Cas system(s) or component(s) thereof or nucleic acid molecule(s) coding therefor

[0906] Cell Penetrating Peptides (CPPs)

[0907] In yet another embodiment, cell penetrating peptides (CPPs) are contemplated for the delivery of the AD-functionalized CRISPR Cas system. CPPs are short peptides that facilitate cellular uptake of various molecular cargo (from nanosize particles to small chemical molecules and large fragments of DNA). The term “cargo” as used herein includes but is not limited to the group consisting of therapeutic agents, diagnostic probes, peptides, nucleic acids, antisense oligonucleotides, plasmids, proteins, particles, including nanoparticles, liposomes, chromophores, small molecules and radioactive materials. In aspects of the invention, the cargo may also comprise any component of the AD-functionalized CRISPR Cas system or the entire AD-functionalized functional CRISPR Cas system. Aspects of the present invention further provide methods for delivering a desired cargo into a subject comprising: (a) preparing a complex comprising the cell penetrating peptide of the present invention and a desired cargo, and (b) orally, intraarticularly, intraperitoneally, intrathecally, intrarterially, intranasally, intraparenchymally, subcutaneously, intramuscularly, intravenously, dermally, intrarectally, or topically administering the complex to a subject. The cargo is associated with the peptides either through chemical linkage via covalent bonds or through non-covalent interactions.

[0908] The function of the CPPs are to deliver the cargo into cells, a process that commonly occurs through endocytosis with the cargo delivered to the endosomes of living mammalian cells. Cell-penetrating peptides are of different sizes, amino acid sequences, and charges but all CPPs have one distinct characteristic, which is the ability to translocate the plasma membrane and facilitate the delivery of various molecular cargoes to the cytoplasm or an organelle. CPP translocation may be classified into three main entry mechanisms: direct penetration in the membrane, endocytosis-mediated entry, and translocation through the formation of a transitory structure. CPPs have found numerous applications in medicine as drug delivery agents in the treatment of different diseases including cancer and virus inhibitors, as well as contrast agents for cell labeling. Examples of the latter include acting as a carrier for GFP, MRI contrast agents, or quantum dots. CPPs hold great potential as in vitro and in vivo delivery vectors for use in research and medicine. CPPs typically have an amino acid composition that either contains a high relative abundance of positively charged amino acids such as lysine or arginine or has sequences that contain an alternating pattern of polar/charged amino acids and non-polar, hydrophobic amino acids. These two types of structures are referred to as polycationic or amphipathic, respectively. A third class of CPPs are the hydrophobic peptides, containing only apolar residues, with low net charge or have hydrophobic amino acid groups that are crucial for cellular uptake. One of the initial CPPs discovered was the trans-activating transcriptional activator (Tat) from Human Immunodeficiency Virus 1 (HIV-1) which was found to be efficiently taken up from the surrounding media by numerous cell types in culture. Since then, the number of known CPPs has expanded considerably and small molecule synthetic analogues with more effective protein transduction properties have been generated. CPPs include but are not limited to Penetratin, Tat (48-60), Transportan, and (R-AhX-R4) (Ahx=aminohexanoyl).

[0909] U.S. Pat. No. 8,372,951, provides a CPP derived from eosinophil cationic protein (ECP) which exhibits highly cell-penetrating efficiency and low toxicity. Aspects of delivering the CPP with its cargo into a vertebrate subject are also provided. Further aspects of CPPs and their delivery are described in U.S. Pat. Nos. 8,575,305; 8,614,194 and 8,044,019. CPPs can be used to deliver the AD-functionalized CRISPR-Cas system or components thereof. That CPPs can be employed to deliver the AD-functionalized CRISPR-Cas system or components thereof is also provided in the manuscript “Gene disruption by cell-penetrating peptide-mediated delivery of Cas9 protein and guide RNA”, by Suresh Ramakrishna, Abu-Bonsrah Kwaku Dad, Jagadish Beloor, et al. Genome Res. 2014 Apr. 2, incorporated by reference in its entirety, wherein it is demonstrated that treatment with CPP-conjugated recombinant Cas9 protein and CPP-complexed guide RNAs lead to endogenous gene disruptions in human cell lines. In the paper the Cas9 protein was conjugated to CPP via a thioether bond, whereas the guide RNA was complexed with CPP, forming condensed, positively charged particles. It was shown that simultaneous and sequential treatment of human cells, including embryonic stem cells, dermal fibroblasts, HEK293T cells, HeLa cells, and embryonic carcinoma cells, with the modified Cas9 and guide RNA led to efficient gene disruptions with reduced off-target mutations relative to plasmid transfections.

[0910] Aerosol Delivery

[0911] Subjects treated for a lung disease may for example receive pharmaceutically effective amount of aerosolized AAV vector system per lung endobronchially delivered while spontaneously breathing. As such, aerosolized delivery is preferred for AAV delivery in general. An adenovirus or an AAV particle may be used for delivery. Suitable gene constructs, each operably linked to one or more regulatory sequences, may be cloned into the delivery vector.

[0912] Packaging and Promoters

[0913] The promoter used to drive CRISPR-Cas protein and adenosine deaminase coding nucleic acid molecule expression can include AAV ITR, which can serve as a promoter. This is advantageous for eliminating the need for an additional promoter element (which can take up space in the vector). The additional space freed up can be used to drive the expression of additional elements (gRNA, etc.). Also, ITR activity is relatively weaker, so can be used to reduce potential toxicity due to over expression of Cas13.

[0914] For ubiquitous expression, promoters that can be used include: CMV, CAG, CBh, PGK, SV40, Ferritin heavy or light chains, etc. For brain or other CNS expression, SynapsinI can be used for all neurons, CaMKIIalpha can be used for excitatory neurons, GAD67 or GAD65 or VGAT can be used for GABAergic neurons. For liver expression, Albumin promoter can be used. For lung expression, SP-B can be used. For endothelial cells, ICAM can be used. For hematopoietic cells, IFNbeta or CD45 can be used. For Osteoblasts, the OG-2 can be used.

[0915] The promoter used to drive guide RNA can include Pol III promoters such as U6 or H1, as well as use of Pol II promoter and intronic cassettes to express guide RNA.

[0916] Adeno Associated Virus (AAV)

[0917] The targeting domain, adenosine deaminase, and one or more guide RNA can be delivered using adeno associated virus (AAV), lentivirus, adenovirus or other plasmid or viral vector types, in particular, using formulations and doses from, for example, U.S. Pat. No. 8,454,972 (formulations, doses for adenovirus), U.S. Pat. No. 8,404,658 (formulations, doses for AAV) and U.S. Pat. No. 5,846,946 (formulations, doses for DNA plasmids) and from clinical trials and publications regarding the clinical trials involving lentivirus, AAV and adenovirus. For examples, for AAV, the route of administration, formulation and dose can be as in U.S. Pat. No. 8,454,972 and as in clinical trials involving AAV. For Adenovirus, the route of administration, formulation and dose can be as in U.S. Pat. No. 8,404,658 and as in clinical trials involving adenovirus. For plasmid delivery, the route of administration, formulation and dose can be as in U.S. Pat. No. 5,846,946 and as in clinical studies involving plasmids. Doses may be based on or extrapolated to an average 70 kg individual (e.g. a male adult human), and can be adjusted for patients, subjects, mammals of different weight and species. Frequency of administration is within the ambit of the medical or veterinary practitioner (e.g., physician, veterinarian), depending on usual factors including the age, sex, general health, other conditions of the patient or subject and the particular condition or symptoms being addressed. The viral vectors can be injected into the tissue of interest. For cell-type specific genome modification, the expression of Cas13 and adenosine deaminase can be driven by a cell-type specific promoter. For example, liver-specific expression might use the Albumin promoter and neuron-specific expression (e.g. for targeting CNS disorders) might use the Synapsin I promoter.

[0918] In terms of in vivo delivery, AAV is advantageous over other viral vectors for a couple of reasons: low toxicity (this may be due to the purification method not requiring ultra centrifugation of cell particles that can activate the immune response); and low probability of causing insertional mutagenesis because it doesn't integrate into the host genome.

[0919] AAV has a packaging limit of 4.5 or 4.75 Kb. This means that Cas13 as well as a promoter and transcription terminator have to be all fit into the same viral vector. Constructs larger than 4.5 or 4.75 Kb will lead to significantly reduced virus production. SpCas9 is quite large, the gene itself is over 4.1 Kb, which makes it difficult for packing into AAV. Therefore embodiments of the invention include utilizing homologs of Cas13 that are shorter.

[0920] As to AAV, the AAV can be AAV1, AAV2, AAV5 or any combination thereof. One can select the AAV of the AAV with regard to the cells to be targeted; e.g., one can select AAV serotypes 1, 2, 5 or a hybrid capsid AAV1, AAV2, AAV5 or any combination thereof for targeting brain or neuronal cells; and one can select AAV4 for targeting cardiac tissue. AAV8 is useful for delivery to the liver. The herein promoters and vectors are preferred individually. A tabulation of certain AAV serotypes as to these cells (see Grimm, D. et al, J. Virol. 82: 5887-5911 (2008)) is as follows:

| Cell Line | AAV-1 | AAV-2 | AAV-3 | AAV-4 | AAV-5 | AAV-6 | AAV-8 | AAV-9 |
|---|---|---|---|---|---|---|---|---|
| Huh-7 | 13 | 100 | 2.5 | 0.0 | 0.1 | 10 | 0.7 | 0.0 |
| HEK293 | 25 | 100 | 2.5 | 0.1 | 0.1 | 5 | 0.7 | 0.1 |
| HeLa | 3 | 100 | 2.0 | 0.1 | 6.7 | 1 | 0.2 | 0.1 |
| HepG2 | 3 | 100 | 16.7 | 0.3 | 1.7 | 5 | 0.3 | ND |
| Hep1A | 20 | 100 | 0.2 | 1.0 | 0.1 | 1 | 0.2 | 0.0 |
| 911 | 17 | 100 | 11 | 0.2 | 0.1 | 17 | 0.1 | ND |
| CHO | 100 | 100 | 14 | 1.4 | 333 | 50 | 10 | 1.0 |
| COS | 33 | 100 | 33 | 3.3 | 5.0 | 14 | 2.0 | 0.5 |
| MeWo | 10 | 100 | 20 | 0.3 | 6.7 | 10 | 1.0 | 0.2 |
| NIH3T3 | 10 | 100 | 2.9 | 2.9 | 0.3 | 10 | 0.3 | ND |
| A549 | 14 | 100 | 20 | ND | 0.5 | 10 | 0.5 | 0.1 |
| HT1180 | 20 | 100 | 10 | 0.1 | 0.3 | 33 | 0.5 | 0.1 |
| Monocytes | 1111 | 100 | ND | ND | 125 | 1429 | ND | ND |
| Immature | 2500 | 100 | ND | ND | 222 | 2857 | ND | ND |
| DC | | | | | | | | |
| Mature DC | 2222 | 100 | ND | ND | 333 | 3333 | ND | ND |

[0921] Lentiviruses

[0922] Lentiviruses are complex retroviruses that have the ability to infect and express their genes in both mitotic and post-mitotic cells. The most commonly known lentivirus is the human immunodeficiency virus (HIV), which uses the envelope glycoproteins of other viruses to target a broad range of cell types.

[0923] Lentiviruses may be prepared as follows. After cloning pCasES10 (which contains a lentiviral transfer plasmid backbone), HEK293FT at low passage (p=5) were seeded in a T-75 flask to 50% confluence the day before transfection in DMEM with 10% fetal bovine serum and without antibiotics. After 20 hours, media was changed to OptiMEM (serum-free) media and transfection was done 4 hours later. Cells were transfected with 10 μg of lentiviral transfer plasmid (pCasES10) and the following packaging plasmids: 5 μg of pMD2.G (VSV-g pseudotype), and 7.5 ug of psPAX2 (gag/pol/rev/tat). Transfection was done in 4 mL OptiMEM with a cationic lipid delivery agent (50 uL Lipofectamine 2000 and 100 ul Plus reagent). After 6 hours, the media was changed to antibiotic-free DMEM with 10% fetal bovine serum. These methods use serum during cell culture, but serum-free methods are preferred.

[0924] Lentivirus may be purified as follows. Viral supernatants were harvested after 48 hours. Supernatants were first cleared of debris and filtered through a 0.45 um low protein binding (PVDF) filter. They were then spun in a ultracentrifuge for 2 hours at 24,000 rpm. Viral pellets were resuspended in 50 ul of DMEM overnight at 4 C. They were then aliquotted and immediately frozen at −80° C.

[0925] In another embodiment, minimal non-primate lentiviral vectors based on the equine infectious anemia virus (EIAV) are also contemplated, especially for ocular gene therapy (see, e.g., Balagaan, J Gene Med 2006; 8: 275-285). In another embodiment, RetinoStat®, an equine infectious anemia virus-based lentiviral gene therapy vector that expresses angiostatic proteins endostatin and angiostatin that is delivered via a subretinal injection for the treatment of the web form of age-related macular degeneration is also contemplated (see, e.g., Binley et al., HUMAN GENE THERAPY 23:980-991 (September 2012)) and this vector may be modified for the AD-functionalized CRISPR-Cas system of the present invention.

[0926] In another embodiment, self-inactivating lentiviral vectors with an siRNA targeting a common exon shared by HIV tat/rev, a nucleolar-localizing TAR decoy, and an anti-CCR5-specific hammerhead ribozyme (see, e.g., DiGiusto et al. (2010) Sci Transl Med 2:36ra43) may be used/and or adapted to the AD-functionalized CRISPR-Cas system of the present invention. A minimum of 2.5×106 CD34+=cells per kilogram patient weight may be collected and prestimulated for 16 to 20 hours in X-VIVO 15 medium (Lonza) containing 2 μmol/L-glutamine, stem cell factor (100 ng/ml), Flt-3 ligand (Flt-3L) (100 ng/ml), and thrombopoietin (10 ng/ml) (CellGenix) at a density of 2×106 cells/ml. Prestimulated cells may be transduced with lentiviral at a multiplicity of infection of 5 for 16 to 24 hours in 75-cm2 tissue culture flasks coated with fibronectin (25 mg/cm2) (RetroNectin, Takara Bio Inc.).

[0927] Lentiviral vectors have been disclosed as in the treatment for Parkinson's Disease, see, e.g., US Patent Publication No. 20120295960 and U.S. Pat. Nos. 7,303,910 and 7,351,585. Lentiviral vectors have also been disclosed for the treatment of ocular diseases, see e.g., US Patent Publication Nos. 20060281180, 20090007284, US20110117189; US20090017543; US20070054961, US20100317109. Lentiviral vectors have also been disclosed for delivery to the brain, see, e.g., US Patent Publication Nos. US20110293571; US20110293571, US20040013648, US20070025970, US20090111106 and U.S. Pat. No. 7,259,015.

### Application in Non-Animal Organisms

[0928] The AD-functionalized CRISPR system(s) (e.g., single or multiplexed) can be used in conjunction with recent advances in crop genomics. The systems described herein can be used to perform efficient and cost effective plant gene or genome interrogation or editing or manipulation—for instance, for rapid investigation and/or selection and/or interrogations and/or comparison and/or manipulations and/or transformation of plant genes or genomes; e.g., to create, identify, develop, optimize, or confer trait(s) or characteristic(s) to plant(s) or to transform a plant genome. There can accordingly be improved production of plants, new plants with new combinations of traits or characteristics or new plants with enhanced traits. The AD-functionalized CRISPR system can be used with regard to plants in Site-Directed Integration (SDI) or Gene Editing (GE) or any Near Reverse Breeding (NRB) or Reverse Breeding (RB) techniques. Aspects of utilizing the herein described Cas13 effector protein systems may be analogous to the use of the CRISPR-Cas (e.g. CRISPR-Cas9) system in plants, and mention is made of the University of Arizona website “CRISPR-PLANT” (http://www.genome.arizona.edu/crispr/) (supported by Penn State and AGI). Embodiments of the invention can be used in genome editing in plants or where RNAi or similar genome editing techniques have been used previously; see, e.g., Nekrasov, “Plant genome editing made easy: targeted mutagenesis in model and crop plants using the CRISPR-Cas system,” Plant Methods 2013, 9:39 (doi:10.1186/1746-4811-9-39); Brooks, “Efficient gene editing in tomato in the first generation using the CRISPR-Cas9 system,” Plant Physiology September 2014 pp 114.247577; Shan, “Targeted genome modification of crop plants using a CRISPR-Cas system,” Nature Biotechnology 31, 686-688 (2013); Feng, “Efficient genome editing in plants using a CRISPR-Cas system,” Cell Research (2013) 23:1229-1232. doi:10.1038/cr.2013.114; published online 20 Aug. 2013; Xie, “RNA-guided genome editing in plants using a CRISPR-Cas system,” Mol Plant. 2013 November; 6(6):1975-83. doi: 10.1093/mp/sst119. Epub 2013 Aug. 17; Xu, “Gene targeting using the Agrobacterium tumefaciens-mediated CRISPR-Cas system in rice,” Rice 2014, 7:5 (2014), Zhou et al., “Exploiting SNPs for biallelic CRISPR mutations in the outcrossing woody perennial Populus reveals 4-coumarate: CoA ligase specificity and Redundancy,” New Phytologist (2015) (Forum) 1-4 (available online only at www.newphytologist.com); Caliando et al, “Targeted DNA degradation using a CRISPR device stably carried in the host genome, NATURE COMMUNICATIONS 6:6989, DOI: 10.1038/ncomms7989, www.nature.com/naturecommunications DOI: 10.1038/ncomms7989; U.S. Pat. No. 6,603,061 —Agrobacterium-Mediated Plant Transformation Method; U.S. Pat. No. 7,868,149—Plant Genome Sequences and Uses Thereof and US 2009/0100536—Transgenic Plants with Enhanced Agronomic Traits, all the contents and disclosure of each of which are herein incorporated by reference in their entirety. In the practice of the invention, the contents and disclosure of Morrell et al “Crop genomics: advances and applications,” Nat Rev Genet. 2011 Dec. 29; 13(2):85-96; each of which is incorporated by reference herein including as to how herein embodiments may be used as to plants. Accordingly, reference herein to animal cells may also apply, mutatis mutandis, to plant cells unless otherwise apparent; and, the enzymes herein having reduced off-target effects and systems employing such enzymes can be used in plant applciations, including those mentioned herein.

[0929] Application of Site Directed Base Editing to Plants and Yeast

[0930] In general, the term “plant” relates to any various photosynthetic, eukaryotic, unicellular or multicellular organism of the kingdom Plantae characteristically growing by cell division, containing chloroplasts, and having cell walls comprised of cellulose. The term plant encompasses monocotyledonous and dicotyledonous plants. Specifically, the plants are intended to comprise without limitation angiosperm and gymnosperm plants such as acacia, alfalfa, amaranth, apple, apricot, artichoke, ash tree, asparagus, avocado, banana, barley, beans, beet, birch, beech, blackberry, blueberry, broccoli, Brussel's sprouts, cabbage, canola, cantaloupe, carrot, cassava, cauliflower, cedar, a cereal, celery, chestnut, cherry, Chinese cabbage, citrus, clementine, clover, coffee, corn, cotton, cowpea, cucumber, cypress, eggplant, elm, endive, eucalyptus, fennel, figs, fir, geranium, grape, grapefruit, groundnuts, ground cherry, gum hemlock, hickory, kale, kiwifruit, kohlrabi, larch, lettuce, leek, lemon, lime, locust, pine, maidenhair, maize, mango, maple, melon, millet, mushroom, mustard, nuts, oak, oats, oil palm, okra, onion, orange, an ornamental plant or flower or tree, papaya, palm, parsley, parsnip, pea, peach, peanut, pear, peat, pepper, persimmon, pigeon pea, pine, pineapple, plantain, plum, pomegranate, potato, pumpkin, radicchio, radish, rapeseed, raspberry, rice, rye, sorghum, safflower, sallow, soybean, spinach, spruce, squash, strawberry, sugar beet, sugarcane, sunflower, sweet potato, sweet corn, tangerine, tea, tobacco, tomato, trees, triticale, turf grasses, turnips, vine, walnut, watercress, watermelon, wheat, yams, yew, and zucchini. The term plant also encompasses Algae, which are mainly photoautotrophs unified primarily by their lack of roots, leaves and other organs that characterize higher plants.

[0931] The methods for genome editing using the AD-functionalized CRISPR system as described herein can be used to confer desired traits on essentially any plant. A wide variety of plants and plant cell systems may be engineered for the desired physiological and agronomic characteristics described herein using the nucleic acid constructs of the present disclosure and the various transformation methods mentioned above. In preferred embodiments, target plants and plant cells for engineering include, but are not limited to, those monocotyledonous and dicotyledonous plants, such as crops including grain crops (e.g., wheat, maize, rice, millet, barley), fruit crops (e.g., tomato, apple, pear, strawberry, orange), forage crops (e.g., alfalfa), root vegetable crops (e.g., carrot, potato, sugar beets, yam), leafy vegetable crops (e.g., lettuce, spinach); flowering plants (e.g., petunia, rose, chrysanthemum), conifers and pine trees (e.g., pine fir, spruce); plants used in phytoremediation (e.g., heavy metal accumulating plants); oil crops (e.g., sunflower, rape seed) and plants used for experimental purposes (e.g., Arabidopsis). Thus, the methods and systems can be used over a broad range of plants, such as for example with dicotyledonous plants belonging to the orders Magniolales, Illiciales, Laurales, Piperales, Aristochiales, Nymphaeales, Ranunculales, Papeverales, Sarraceniaceae, Trochodendrales, Hamamelidales, Eucomiales, Leitneriales, Myricales, Fagales, Casuarinales, Caryophyllales, Batales, Polygonales, Plumbaginales, Dilleniales, Theales, Malvales, Urticales, Lecythidales, Violales, Salicales, Capparales, Ericales, Diapensales, Ebenales, Primulales, Rosales, Fabales, Podostemales, Haloragales, Myrtales, Cornales, Proteales, San tales, Rafflesiales, Celastrales, Euphorbiales, Rhamnales, Sapindales, Juglandales, Geraniales, Polygalales, Umbellales, Gentianales, Polemoniales, Lamiales, Plantaginales, Scrophulariales, Campanulales, Rubiales, Dipsacales, and Asterales; the methods and CRISPR-Cas systems can be used with monocotyledonous plants such as those belonging to the orders Alismatales, Hydrocharitales, Najadales, Triuridales, Commelinales, Eriocaulales, Restionales, Poales, Juncales, Cyperales, Typhales, Bromeliales, Zingiberales, Arecales, Cyclanthales, Pandanales, Arales, Lilliales, and Orchid ales, or with plants belonging to Gymnospermae, e.g those belonging to the orders Pinales, Ginkgoales, Cycadales, Araucariales, Cupressales and Gnetales.

[0932] The AD-functionalized CRISPR systems and methods of use described herein can be used over a broad range of plant species, included in the non-limitative list of dicot, monocot or gymnosperm genera hereunder: Atropa, Alseodaphne, Anacardium, Arachis, Beilschmiedia, Brassica, Carthamus, Cocculus, Croton, Cucumis, Citrus, Citrullus, Capsicum, Catharanthus, Cocos, Coffea, Cucurbita, Daucus, Duguetia, Eschscholzia, Ficus, Fragaria, Glaucium, Glycine, Gossypium, Helianthus, Hevea, Hyoscyamus, Lactuca, Landolphia, Linum, Litsea, Lycopersicon, Lupinus, Manihot, Majorana, Malus, Medicago, Nicotiana, Olea, Parthenium, Papaver, Persea, Phaseolus, Pistacia, Pisum, Pyrus, Prunus, Raphanus, Ricinus, Senecio, Sinomenium, Stephania, Sinapis, Solanum, Theobroma, Trifolium, Trigonella, Vicia, Vinca, Vilis, and Vigna; and the genera Allium, Andropogon, Aragrostis, Asparagus, Avena, Cynodon, Elaeis, Festuca, Festulolium, Heterocallis, Hordeum, Lemna, Lolium, Musa, Oryza, Panicum, Pannesetum, Phleum, Poa, Secale, Sorghum, Triticum, Zea, Abies, Cunninghamia, Ephedra, Picea, Pinus, and Pseudotsuga.

[0933] The AD-functionalized CRISPR systems and methods of use can also be used over a broad range of “algae” or “algae cells”; including for example algea selected from several eukaryotic phyla, including the Rhodophyta (red algae), Chlorophyta (green algae), Phaeophyta (brown algae), Bacillariophyta (diatoms), Eustigmatophyta and dinoflagellates as well as the prokaryotic phylum Cyanobacteria (blue-green algae). The term “algae” includes for example algae selected from: Amphora, Anabaena, Anikstrodesmis, Botryococcus, Chaetoceros, Chlamydomonas, Chlorella, Chlorococcum, Cyclotella, Cylindrotheca, Dunaliella, Emiliana, Euglena, Hematococcus, Isochrysis, Monochrysis, Monoraphidium, Nannochloris, Nannnochloropsis, Navicula, Nephrochloris, Nephroselmis, Nitzschia, Nodularia, Nostoc, Oochromonas, Oocystis, Oscillartoria, Pavlova, Phaeodactylum, Playtmonas, Pleurochrysis, Porhyra, Pseudoanabaena, Pyramimonas, Stichococcus, Synechococcus, Synechocystis, Tetraselmis, Thalassiosira, and Trichodesmium.

[0934] A part of a plant, i.e., a “plant tissue” may be treated according to the methods of the present invention to produce an improved plant. Plant tissue also encompasses plant cells. The term “plant cell” as used herein refers to individual units of a living plant, either in an intact whole plant or in an isolated form grown in in vitro tissue cultures, on media or agar, in suspension in a growth media or buffer or as a part of higher organized unites, such as, for example, plant tissue, a plant organ, or a whole plant.

[0935] A “protoplast” refers to a plant cell that has had its protective cell wall completely or partially removed using, for example, mechanical or enzymatic means resulting in an intact biochemical competent unit of living plant that can reform their cell wall, proliferate and regenerate grow into a whole plant under proper growing conditions.

[0936] The term “transformation” broadly refers to the process by which a plant host is genetically modified by the introduction of DNA by means of Agrobacteria or one of a variety of chemical or physical methods. As used herein, the term “plant host” refers to plants, including any cells, tissues, organs, or progeny of the plants. Many suitable plant tissues or plant cells can be transformed and include, but are not limited to, protoplasts, somatic embryos, pollen, leaves, seedlings, stems, calli, stolons, microtubers, and shoots. A plant tissue also refers to any clone of such a plant, seed, progeny, propagule whether generated sexually or asexually, and descendents of any of these, such as cuttings or seed.

[0937] The term “transformed” as used herein, refers to a cell, tissue, organ, or organism into which a foreign DNA molecule, such as a construct, has been introduced. The introduced DNA molecule may be integrated into the genomic DNA of the recipient cell, tissue, organ, or organism such that the introduced DNA molecule is transmitted to the subsequent progeny. In these embodiments, the “transformed” or “transgenic” cell or plant may also include progeny of the cell or plant and progeny produced from a breeding program employing such a transformed plant as a parent in a cross and exhibiting an altered phenotype resulting from the presence of the introduced DNA molecule. Preferably, the transgenic plant is fertile and capable of transmitting the introduced DNA to progeny through sexual reproduction.

[0938] The term “progeny”, such as the progeny of a transgenic plant, is one that is born of, begotten by, or derived from a plant or the transgenic plant. The introduced DNA molecule may also be transiently introduced into the recipient cell such that the introduced DNA molecule is not inherited by subsequent progeny and thus not considered “transgenic”. Accordingly, as used herein, a “non-transgenic” plant or plant cell is a plant which does not contain a foreign DNA stably integrated into its genome.

[0939] The term “plant promoter” as used herein is a promoter capable of initiating transcription in plant cells, whether or not its origin is a plant cell. Exemplary suitable plant promoters include, but are not limited to, those that are obtained from plants, plant viruses, and bacteria such as Agrobacterium or Rhizobium which comprise genes expressed in plant cells.

[0940] As used herein, a “fungal cell” refers to any type of eukaryotic cell within the kingdom of fungi. Phyla within the kingdom of fungi include Ascomycota, Basidiomycota, Blastocladiomycota, Chytridiomycota, Glomeromycota, Microsporidia, and Neocallimastigomycota. Fungal cells may include yeasts, molds, and filamentous fungi. In some embodiments, the fungal cell is a yeast cell.

[0941] As used herein, the term “yeast cell” refers to any fungal cell within the phyla Ascomycota and Basidiomycota. Yeast cells may include budding yeast cells, fission yeast cells, and mold cells. Without being limited to these organisms, many types of yeast used in laboratory and industrial settings are part of the phylum Ascomycota. In some embodiments, the yeast cell is an S. cerervisiae, Kluyveromyces marxianus, or Issatchenkia orientalis cell. Other yeast cells may include without limitation Candida spp. (e.g., Candida albicans), Yarrowia spp. (e.g., Yarrowia lipolytica), Pichia spp. (e.g., Pichia pastoris), Kluyveromyces spp. (e.g., Kluyveromyces lactis and Kluyveromyces marxianus), Neurospora spp. (e.g., Neurospora crassa), Fusarium spp. (e.g., Fusarium oxysporum), and Issatchenkia spp. (e.g., Issatchenkia orientalis, a.k.a. Pichia kudriavzevii and Candida acidothermophilum). In some embodiments, the fungal cell is a filamentous fungal cell. As used herein, the term “filamentous fungal cell” refers to any type of fungal cell that grows in filaments, i.e., hyphae or mycelia. Examples of filamentous fungal cells may include without limitation Aspergillus spp. (e.g., Aspergillus niger), Trichoderma spp. (e.g., Trichoderma reesei), Rhizopus spp. (e.g., Rhizopus oryzae), and Mortierella spp. (e.g., Mortierella isabellina).

[0942] In some embodiments, the fungal cell is an industrial strain. As used herein, “industrial strain” refers to any strain of fungal cell used in or isolated from an industrial process, e.g., production of a product on a commercial or industrial scale. Industrial strain may refer to a fungal species that is typically used in an industrial process, or it may refer to an isolate of a fungal species that may be also used for non-industrial purposes (e.g., laboratory research). Examples of industrial processes may include fermentation (e.g., in production of food or beverage products), distillation, biofuel production, production of a compound, and production of a polypeptide. Examples of industrial strains may include, without limitation, JAY270 and ATCC4124.

[0943] In some embodiments, the fungal cell is a polyploid cell. As used herein, a “polyploid” cell may refer to any cell whose genome is present in more than one copy. A polyploid cell may refer to a type of cell that is naturally found in a polyploid state, or it may refer to a cell that has been induced to exist in a polyploid state (e.g., through specific regulation, alteration, inactivation, activation, or modification of meiosis, cytokinesis, or DNA replication). A polyploid cell may refer to a cell whose entire genome is polyploid, or it may refer to a cell that is polyploid in a particular genomic locus of interest. Without wishing to be bound to theory, it is thought that the abundance of guideRNA may more often be a rate-limiting component in genome engineering of polyploid cells than in haploid cells, and thus the methods using the AD-functionalized CRISPR system described herein may take advantage of using a certain fungal cell type.

[0944] In some embodiments, the fungal cell is a diploid cell. As used herein, a “diploid” cell may refer to any cell whose genome is present in two copies. A diploid cell may refer to a type of cell that is naturally found in a diploid state, or it may refer to a cell that has been induced to exist in a diploid state (e.g., through specific regulation, alteration, inactivation, activation, or modification of meiosis, cytokinesis, or DNA replication). For example, the S. cerevisiae strain S228C may be maintained in a haploid or diploid state. A diploid cell may refer to a cell whose entire genome is diploid, or it may refer to a cell that is diploid in a particular genomic locus of interest. In some embodiments, the fungal cell is a haploid cell. As used herein, a “haploid” cell may refer to any cell whose genome is present in one copy. A haploid cell may refer to a type of cell that is naturally found in a haploid state, or it may refer to a cell that has been induced to exist in a haploid state (e.g., through specific regulation, alteration, inactivation, activation, or modification of meiosis, cytokinesis, or DNA replication). For example, the S. cerevisiae strain S228C may be maintained in a haploid or diploid state. A haploid cell may refer to a cell whose entire genome is haploid, or it may refer to a cell that is haploid in a particular genomic locus of interest.

[0945] As used herein, a “yeast expression vector” refers to a nucleic acid that contains one or more sequences encoding an RNA and/or polypeptide and may further contain any desired elements that control the expression of the nucleic acid(s), as well as any elements that enable the replication and maintenance of the expression vector inside the yeast cell. Many suitable yeast expression vectors and features thereof are known in the art; for example, various vectors and techniques are illustrated in in Yeast Protocols, 2nd edition, Xiao, W., ed. (Humana Press, New York, 2007) and Buckholz, R. G. and Gleeson, M. A. (1991) Biotechnology (NY) 9(11): 1067-72. Yeast vectors may contain, without limitation, a centromeric (CEN) sequence, an autonomous replication sequence (ARS), a promoter, such as an RNA Polymerase III promoter, operably linked to a sequence or gene of interest, a terminator such as an RNA polymerase III terminator, an origin of replication, and a marker gene (e.g., auxotrophic, antibiotic, or other selectable markers). Examples of expression vectors for use in yeast may include plasmids, yeast artificial chromosomes, 2 μ plasmids, yeast integrative plasmids, yeast replicative plasmids, shuttle vectors, and episomal plasmids.

[0946] Stable Integration of AD-Functionalized CRISPR System Components in the Genome of Plants and Plant Cells

[0947] In particular embodiments, it is envisaged that the polynucleotides encoding the components of the AD-functionalized CRISPR system are introduced for stable integration into the genome of a plant cell. In these embodiments, the design of the transformation vector or the expression system can be adjusted depending on for when, where and under what conditions the guide RNA and/or fusion protein of adenosine deaminase and Cas13 are expressed.

[0948] In particular embodiments, it is envisaged to introduce the components of the AD-functionalized CRISPR system stably into the genomic DNA of a plant cell. Additionally or alternatively, it is envisaged to introduce the components of the AD-functionalized CRISPR system for stable integration into the DNA of a plant organelle such as, but not limited to a plastid, e mitochondrion or a chloroplast.

[0949] The expression system for stable integration into the genome of a plant cell may contain one or more of the following elements: a promoter element that can be used to express the RNA and/or fusion protein of adenosine deaminase and Cas13 in a plant cell; a 5′ untranslated region to enhance expression; an intron element to further enhance expression in certain cells, such as monocot cells; a multiple-cloning site to provide convenient restriction sites for inserting the guide RNA and/or the fusion protein of adenosine deaminase and Cas13 encoding sequences and other desired elements; and a 3′ untranslated region to provide for efficient termination of the expressed transcript.

[0950] The elements of the expression system may be on one or more expression constructs which are either circular such as a plasmid or transformation vector, or non-circular such as linear double stranded DNA.

[0951] In a particular embodiment, a AD-functionalized CRISPR expression system comprises at least: a nucleotide sequence encoding a guide RNA (gRNA) that hybridizes with a target sequence in a plant, and wherein the guide RNA comprises a guide sequence and a direct repeat sequence, and a nucleotide sequence encoding a fusion protein of adenosine deaminase and Cas13, wherein components (a) or (b) are located on the same or on different constructs, and whereby the different nucleotide sequences can be under control of the same or a different regulatory element operable in a plant cell.

[0952] DNA construct(s) containing the components of the AD-functionalized CRISPR system, and, where applicable, template sequence may be introduced into the genome of a plant, plant part, or plant cell by a variety of conventional techniques. The process generally comprises the steps of selecting a suitable host cell or host tissue, introducing the construct(s) into the host cell or host tissue, and regenerating plant cells or plants therefrom.

[0953] In particular embodiments, the DNA construct may be introduced into the plant cell using techniques such as but not limited to electroporation, microinjection, aerosol beam injection of plant cell protoplasts, or the DNA constructs can be introduced directly to plant tissue using biolistic methods, such as DNA particle bombardment (see also Fu et al., Transgenic Res. 2000 February; 9(1):11-9). The basis of particle bombardment is the acceleration of particles coated with gene/s of interest toward cells, resulting in the penetration of the protoplasm by the particles and typically stable integration into the genome. (see e.g. Klein et al, Nature (1987), Klein et ah, Bio/Technology (1992), Casas et ah, Proc. Natl. Acad. Sci. USA (1993).).

[0954] In particular embodiments, the DNA constructs containing components of the AD-functionalized CRISPR system may be introduced into the plant by Agrobacterium-mediated transformation. The DNA constructs may be combined with suitable T-DNA flanking regions and introduced into a conventional Agrobacterium tumefaciens host vector. The foreign DNA can be incorporated into the genome of plants by infecting the plants or by incubating plant protoplasts with Agrobacterium bacteria, containing one or more Ti (tumor-inducing) plasmids. (see e.g. Fraley et al., (1985), Rogers et al., (1987) and U.S. Pat. No. 5,563,055).

[0955] Plant Promoters

[0956] In order to ensure appropriate expression in a plant cell, the components of the AD-functionalized CRISPR system described herein are typically placed under control of a plant promoter, i.e. a promoter operable in plant cells. The use of different types of promoters is envisaged.

[0957] A constitutive plant promoter is a promoter that is able to express the open reading frame (ORF) that it controls in all or nearly all of the plant tissues during all or nearly all developmental stages of the plant (referred to as “constitutive expression”). One non-limiting example of a constitutive promoter is the cauliflower mosaic virus 35S promoter. “Regulated promoter” refers to promoters that direct gene expression not constitutively, but in a temporally- and/or spatially-regulated manner, and includes tissue-specific, tissue-preferred and inducible promoters. Different promoters may direct the expression of a gene in different tissues or cell types, or at different stages of development, or in response to different environmental conditions. In particular embodiments, one or more of the AD-functionalized CRISPR components are expressed under the control of a constitutive promoter, such as the cauliflower mosaic virus 35S promoter issue-preferred promoters can be utilized to target enhanced expression in certain cell types within a particular plant tissue, for instance vascular cells in leaves or roots or in specific cells of the seed. Examples of particular promoters for use in the AD-functionalized CRISPR system are found in Kawamata et al., (1997) Plant Cell Physiol 38:792-803; Yamamoto et al., (1997) Plant J 12:255-65; Hire et al, (1992) Plant Mol Biol 20:207-18, Kuster et al, (1995) Plant Mol Biol 29:759-72, and Capana et al., (1994) Plant Mol Biol 25:681-91.

[0958] Inducible promoters can be of interest to express one or more of the components of the AD-functionalized CRISPR system under limited circumstances to avoid non-specific activity of the deaminase. In particular embodiments, one or more elements of the AD-functionalized CRISPR system are expressed under control of an inducible promoter. Examples of promoters that are inducible and that allow for spatiotemporal control of gene editing or gene expression may use a form of energy. The form of energy may include but is not limited to sound energy, electromagnetic radiation, chemical energy and/or thermal energy. Examples of inducible systems include tetracycline inducible promoters (Tet-On or Tet-Off), small molecule two-hybrid transcription activations systems (FKBP, ABA, etc), or light inducible systems (Phytochrome, LOV domains, or cryptochrome)., such as a Light Inducible Transcriptional Effector (LITE) that direct changes in transcriptional activity in a sequence-specific manner. The components of a light inducible system may include a fusion protein of adenosine deaminase and Cas13, a light-responsive cytochrome heterodimer (e.g. from Arabidopsis thaliana). Further examples of inducible DNA binding proteins and methods for their use are provided in U.S. 61/736,465 and U.S. 61/721,283, which is hereby incorporated by reference in its entirety.

[0959] In particular embodiments, transient or inducible expression can be achieved by using, for example, chemical-regulated promotors, i.e. whereby the application of an exogenous chemical induces gene expression. Modulating of gene expression can also be obtained by a chemical-repressible promoter, where application of the chemical represses gene expression. Chemical-inducible promoters include, but are not limited to, the maize ln2-2 promoter, activated by benzene sulfonamide herbicide safeners (De Veylder et al., (1997) Plant Cell Physiol 38:568-77), the maize GST promoter (GST-ll-27, WO93/01294), activated by hydrophobic electrophilic compounds used as pre-emergent herbicides, and the tobacco PR-1 a promoter (Ono et al., (2004) Biosci Biotechnol Biochem 68:803-7) activated by salicylic acid. Promoters which are regulated by antibiotics, such as tetracycline-inducible and tetracycline-repressible promoters (Gatz et al., (1991) Mol Gen Genet 227:229-37; U.S. Pat. Nos. 5,814,618 and 5,789,156) can also be used herein.

[0960] Translocation to and/or Expression in Specific Plant Organelles

[0961] The expression system may comprise elements for translocation to and/or expression in a specific plant organelle.

[0962] Chloroplast Targeting

[0963] In particular embodiments, it is envisaged that the AD-functionalized CRISPR system is used to specifically modify chloroplast genes or to ensure expression in the chloroplast. For this purpose use is made of chloroplast transformation methods or compartimentalization of the AD-functionalized CRISPR components to the chloroplast. For instance, the introduction of genetic modifications in the plastid genome can reduce biosafety issues such as gene flow through pollen.

[0964] Methods of chloroplast transformation are known in the art and include Particle bombardment, PEG treatment, and microinjection. Additionally, methods involving the translocation of transformation cassettes from the nuclear genome to the pastid can be used as described in WO2010061186.

[0965] Alternatively, it is envisaged to target one or more of the AD-functionalized CRISPR components to the plant chloroplast. This is achieved by incorporating in the expression construct a sequence encoding a chloroplast transit peptide (CTP) or plastid transit peptide, operably linked to the 5′ region of the sequence encoding the fusion protein of adenosine deaminase and Cas13. The CTP is removed in a processing step during translocation into the chloroplast. Chloroplast targeting of expressed proteins is well known to the skilled artisan (see for instance Protein Transport into Chloroplasts, 2010, Annual Review of Plant Biology, Vol. 61: 157-180). In such embodiments it is also desired to target the guide RNA to the plant chloroplast. Methods and constructs which can be used for translocating guide RNA into the chloroplast by means of a chloroplast localization sequence are described, for instance, in US 20040142476, incorporated herein by reference. Such variations of constructs can be incorporated into the expression systems of the invention to efficiently translocate the AD-functionalized CRISPR system components.

### Introduction of Polynucleotides Encoding the AD-Functionalized CRISPR System in Algae Cells.

[0966] Transgenic algae (or other plants such as rape) may be particularly useful in the production of vegetable oils or biofuels such as alcohols (especially methanol and ethanol) or other products. These may be engineered to express or overexpress high levels of oil or alcohols for use in the oil or biofuel industries.

[0967] U.S. Pat. No. 8,945,839 describes a method for engineering Micro-Algae (Chlamydomonas reinhardtii cells) species) using Cas9. Using similar tools, the methods of the AD-functionalized CRISPR system described herein can be applied on Chlamydomonas species and other algae. In particular embodiments, a CRISPR-Cas protein (e.g., Cas13), adenosine deaminase (which may be fused to the CRISPR-Cas protein or an aptamer-binding adaptor protein), and guide RNA are introduced in algae expressed using a vector that expresses the fusion protein of adenosine deaminase and Cas13 under the control of a constitutive promoter such as Hsp70A-Rbc S2 or Beta2-tubulin. Guide RNA is optionally delivered using a vector containing T7 promoter. Alternatively, Cas13 mRNA and in vitro transcribed guide RNA can be delivered to algal cells. Electroporation protocols are available to the skilled person such as the standard recommended protocol from the GeneArt Chlamydomonas Engineering kit.

[0968] Introduction of AD-Functionalized Compositions in Yeast Cells

[0969] In particular embodiments, the invention relates to the use of the AD-functionalized CRISPR system for genome editing of yeast cells. Methods for transforming yeast cells which can be used to introduce polynucleotides encoding the AD-functionalized CRISPR system components are described in Kawai et al., 2010, Bioeng Bugs. 2010 November-December; 1(6): 395-403). Non-limiting examples include transformation of yeast cells by lithium acetate treatment (which may further include carrier DNA and PEG treatment), bombardment or by electroporation.

[0970] Transient Expression of AD-Functionalized CRISPR System Components in Plants and Plant Cell

[0971] In particular embodiments, it is envisaged that the guide RNA and/or CRISPR-Cas gene are transiently expressed in the plant cell. In these embodiments, the AD-functionalized CRISPR system can ensure modification of a target gene only when both the guide RNA, the CRISPR-Cas protein (e.g., Cas13), and adenosine deaminase (which may be fused to the CRISPR-Cas protein or an aptamer-binding adaptor protein), are present in a cell, such that genomic modification can further be controlled. As the expression of the CRISPR-Cas protein is transient, plants regenerated from such plant cells typically contain no foreign DNA. In particular embodiments the CRISPR-Cas protein is stably expressed by the plant cell and the guide sequence is transiently expressed.

[0972] In particular embodiments, the AD-functionalized CRISPR system components can be introduced in the plant cells using a plant viral vector (Scholthof et al. 1996, Annu Rev Phytopathol. 1996; 34:299-323). In further particular embodiments, said viral vector is a vector from a DNA virus. For example, geminivirus (e.g., cabbage leaf curl virus, bean yellow dwarf virus, wheat dwarf virus, tomato leaf curl virus, maize streak virus, tobacco leaf curl virus, or tomato golden mosaic virus) or nanovirus (e.g., Faba bean necrotic yellow virus). In other particular embodiments, said viral vector is a vector from an RNA virus. For example, tobravirus (e.g., tobacco rattle virus, tobacco mosaic virus), potexvirus (e.g., potato virus X), or hordeivirus (e.g., barley stripe mosaic virus). The replicating genomes of plant viruses are non-integrative vectors.

[0973] In particular embodiments, the vector used for transient expression of AD-functionalized CRISPR system is for instance a pEAQ vector, which is tailored for Agrobacterium-mediated transient expression (Sainsbury F. et al., Plant Biotechnol J. 2009 September; 7(7):682-93) in the protoplast. Precise targeting of genomic locations was demonstrated using a modified Cabbage Leaf Curl virus (CaLCuV) vector to express guide RNAs in stable transgenic plants expressing a CRISPR enzyme (Scientific Reports 5, Article number: 14926 (2015), doi:10.1038/srep14926).

[0974] In particular embodiments, double-stranded DNA fragments encoding the guide RNA and/or the CRISPR-Cas gene can be transiently introduced into the plant cell. In such embodiments, the introduced double-stranded DNA fragments are provided in sufficient quantity to modify the cell but do not persist after a contemplated period of time has passed or after one or more cell divisions. Methods for direct DNA transfer in plants are known by the skilled artisan (see for instance Davey et al. Plant Mol Biol. 1989 September; 13(3):273-85.)

[0975] In other embodiments, an RNA polynucleotide encoding the CRISPR-Cas protein (e.g., Cas13) and/or adenosine deaminase (which may be fused to the CRISPR-Cas protein or an aptamer-binding adaptor protein) is introduced into the plant cell, which is then translated and processed by the host cell generating the protein in sufficient quantity to modify the cell (in the presence of at least one guide RNA) but which does not persist after a contemplated period of time has passed or after one or more cell divisions. Methods for introducing mRNA to plant protoplasts for transient expression are known by the skilled artisan (see for instance in Gallie, Plant Cell Reports (1993), 13; 119-122).

[0976] Combinations of the different methods described above are also envisaged.

[0977] Delivery of AD-Functionalized Compositions to the Plant Cell

[0978] In particular embodiments, it is of interest to deliver one or more components of the AD-functionalized CRISPR system directly to the plant cell. This is of interest, inter alia, for the generation of non-transgenic plants (see below). In particular embodiments, one or more of the AD-functionalized CRISPR system components is prepared outside the plant or plant cell and delivered to the cell. For instance in particular embodiments, the CRISPR-Cas protein is prepared in vitro prior to introduction to the plant cell. The CRISPR-Cas protein can be prepared by various methods known by one of skill in the art and include recombinant production. After expression, the CRISPR-Cas protein is isolated, refolded if needed, purified and optionally treated to remove any purification tags, such as a His-tag. Once crude, partially purified, or more completely purified CRISPR-Cas protein is obtained, the protein may be introduced to the plant cell.

[0979] In particular embodiments, the CRISPR-Cas protein is mixed with guide RNA targeting the gene of interest to form a pre-assembled ribonucleoprotein.

[0980] The individual components or pre-assembled ribonucleoprotein can be introduced into the plant cell via electroporation, by bombardment with CRISPR-Cas-associated gene product coated particles, by chemical transfection or by some other means of transport across a cell membrane. For instance, transfection of a plant protoplast with a pre-assembled CRISPR ribonucleoprotein has been demonstrated to ensure targeted modification of the plant genome (as described by Woo et al. Nature Biotechnology, 2015; DOI: 10.1038/nbt.3389).

[0981] In particular embodiments, the AD-functionalized CRISPR system components are introduced into the plant cells using nanoparticles. The components, either as protein or nucleic acid or in a combination thereof, can be uploaded onto or packaged in nanoparticles and applied to the plants (such as for instance described in WO 2008042156 and US 20130185823). In particular, embodiments of the invention comprise nanoparticles uploaded with or packed with DNA molecule(s) encoding the CRISPR-Cas protein (e.g., Cas13), DNA molecule(s) encoding adenosine deaminase (which may be fused to the CRISPR-Cas protein or an aptamer-binding adaptor protein), and DNA molecules encoding the guide RNA and/or isolated guide RNA as described in WO2015089419.

[0982] Further means of introducing one or more components of the AD-functionalized CRISPR system to the plant cell is by using cell penetrating peptides (CPP). Accordingly, in particular, embodiments the invention comprises compositions comprising a cell penetrating peptide linked to the CRISPR-Cas protein. In particular embodiments of the present invention, the CRISPR-Cas protein and/or guide RNA is coupled to one or more CPPs to effectively transport them inside plant protoplasts. Ramakrishna (Genome Res. 2014 June; 24(6):1020-7 for Cas9 in human cells). In other embodiments, the CRISPR-Cas gene and/or guide RNA are encoded by one or more circular or non-circular DNA molecule(s) which are coupled to one or more CPPs for plant protoplast delivery. The plant protoplasts are then regenerated to plant cells and further to plants. CPPs are generally described as short peptides of fewer than 35 amino acids either derived from proteins or from chimeric sequences which are capable of transporting biomolecules across cell membrane in a receptor independent manner. CPP can be cationic peptides, peptides having hydrophobic sequences, amphipatic peptides, peptides having proline-rich and anti-microbial sequence, and chimeric or bipartite peptides (Pooga and Langel 2005). CPPs are able to penetrate biological membranes and as such trigger the movement of various biomolecules across cell membranes into the cytoplasm and to improve their intracellular routing, and hence facilitate interaction of the biolomolecule with the target. Examples of CPP include amongst others: Tat, a nuclear transcriptional activator protein required for viral replication by HIV type1, penetratin, Kaposi fibroblast growth factor (FGF) signal peptide sequence, integrin β3 signal peptide sequence; polyarginine peptide Args sequence, Guanine rich-molecular transporters, sweet arrow peptide, etc.

[0983] Use of the AD-Functionalized Compositions to Make Genetically Modified Non-Transgenic Plants

[0984] In particular embodiments, the methods described herein are used to modify endogenous genes or to modify their expression without the permanent introduction into the genome of the plant of any foreign gene, including those encoding CRISPR components, so as to avoid the presence of foreign DNA in the genome of the plant. This can be of interest as the regulatory requirements for non-transgenic plants are less rigorous.

[0985] In particular embodiments, this is ensured by transient expression of the AD-functionalized CRISPR system components. In particular embodiments one or more of the components are expressed on one or more viral vectors which produce sufficient CRISPR-Cas protein, adenosine deaminase, and guide RNA to consistently steadily ensure modification of a gene of interest according to a method described herein.

[0986] In particular embodiments, transient expression of AD-functionalized CRISPR system constructs is ensured in plant protoplasts and thus not integrated into the genome. The limited window of expression can be sufficient to allow the AD-functionalized CRISPR system to ensure modification of a target gene as described herein.

[0987] In particular embodiments, the different components of the AD-functionalized CRISPR system are introduced in the plant cell, protoplast or plant tissue either separately or in mixture, with the aid of pariculate delivering molecules such as nanoparticles or CPP molecules as described herein above.

[0988] The expression of the AD-functionalized CRISPR system components can induce targeted modification of the genome, by deaminase activity of the adenosine deaminase. The different strategies described herein above allow CRISPR-mediated targeted genome editing without requiring the introduction of the AD-functionalized CRISPR systemt components into the plant genome. Components which are transiently introduced into the plant cell are typically removed upon crossing.

[0989] Plant Cultures and Regeneration

[0990] In particular embodiments, plant cells which have a modified genome and that are produced or obtained by any of the methods described herein, can be cultured to regenerate a whole plant which possesses the transformed or modified genotype and thus the desired phenotype. Conventional regeneration techniques are well known to those skilled in the art. Particular examples of such regeneration techniques rely on manipulation of certain phytohormones in a tissue culture growth medium, and typically relying on a biocide and/or herbicide marker which has been introduced together with the desired nucleotide sequences. In further particular embodiments, plant regeneration is obtained from cultured protoplasts, plant callus, explants, organs, pollens, embryos or parts thereof (see e.g. Evans et al. (1983), Handbook of Plant Cell Culture, Klee et al (1987) Ann. Rev. of Plant Phys.).

[0991] In particular embodiments, transformed or improved plants as described herein can be self-pollinated to provide seed for homozygous improved plants of the invention (homozygous for the DNA modification) or crossed with non-transgenic plants or different improved plants to provide seed for heterozygous plants. Where a recombinant DNA was introduced into the plant cell, the resulting plant of such a crossing is a plant which is heterozygous for the recombinant DNA molecule. Both such homozygous and heterozygous plants obtained by crossing from the improved plants and comprising the genetic modification (which can be a recombinant DNA) are referred to herein as “progeny”. Progeny plants are plants descended from the original transgenic plant and containing the genome modification or recombinant DNA molecule introduced by the methods provided herein. Alternatively, genetically modified plants can be obtained by one of the methods described supra using the AD-functionalized CRISPR system whereby no foreign DNA is incorporated into the genome. Progeny of such plants, obtained by further breeding may also contain the genetic modification. Breedings are performed by any breeding methods that are commonly used for different crops (e.g., Allard, Principles of Plant Breeding, John Wiley & Sons, NY, U. of CA, Davis, Calif., 50-98(1960).

[0992] Generation of Plants with Enhanced Agronomic Traits

[0993] The AD-functionalized CRISPR systems provided herein can be used to introduce targeted A-G and T-C mutations. By co-expression of multiple targeting RNAs directed to achieve multiple modifications in a single cell, multiplexed genome modification can be ensured. This technology can be used to high-precision engineering of plants with improved characteristics, including enhanced nutritional quality, increased resistance to diseases and resistance to biotic and abiotic stress, and increased production of commercially valuable plant products or heterologous compounds.

[0994] In particular embodiments, the AD-functionalized CRISPR system as described herein is used to introduce targeted A-G and T-C mutations. Such mutation can be a nonsense mutation (e.g., premature stop codon) or a missense mutation (e.g., encoding different amino acid residue). This is of interest where the A-G and T-C mutations in certain endogenous genes can confer or contribute to a desired trait.

[0995] The methods described herein generally result in the generation of “improved plants” in that they have one or more desirable traits compared to the wildtype plant. In particular embodiments, the plants, plant cells or plant parts obtained are transgenic plants, comprising an exogenous DNA sequence incorporated into the genome of all or part of the cells of the plant. In particular embodiments, non-transgenic genetically modified plants, plant parts or cells are obtained, in that no exogenous DNA sequence is incorporated into the genome of any of the plant cells of the plant. In such embodiments, the improved plants are non-transgenic. Where only the modification of an endogenous gene is ensured and no foreign genes are introduced or maintained in the plant genome, the resulting genetically modified crops contain no foreign genes and can thus basically be considered non-transgenic.

[0996] In particular embodiments, the polynucleotides are delivered into the cell by a DNA virus (e.g., a geminivirus) or an RNA virus (e.g., a tobravirus). In particular embodiments, the introducing steps include delivering to the plant cell a T-DNA containing one or more polynucleotide sequences encoding the CRISPR-Cas protein, the adenosine deaminase, and the guide RNA, where the delivering is via Agrobacterium. The polynucleotide sequence encoding the components of the AD-functionalized CRISPR system can be operably linked to a promoter, such as a constitutive promoter (e.g., a cauliflower mosaic virus 35S promoter), or a cell specific or inducible promoter. In particular embodiments, the polynucleotide is introduced by microprojectile bombardment. In particular embodiments, the method further includes screening the plant cell after the introducing steps to determine whether the expression of the gene of interest has been modified. In particular embodiments, the methods include the step of regenerating a plant from the plant cell. In further embodiments, the methods include cross breeding the plant to obtain a genetically desired plant lineage.

[0997] In particular embodiments of the methods described above, disease resistant crops are obtained by targeted mutation of disease susceptibility genes or genes encoding negative regulators (e.g. Mlo gene) of plant defense genes. In a particular embodiment, herbicide-tolerant crops are generated by targeted substitution of specific nucleotides in plant genes such as those encoding acetolactate synthase (ALS) and protoporphyrinogen oxidase (PPO). In particular embodiments drought and salt tolerant crops by targeted mutation of genes encoding negative regulators of abiotic stress tolerance, low amylose grains by targeted mutation of Waxy gene, rice or other grains with reduced rancidity by targeted mutation of major lipase genes in aleurone layer, etc. In particular embodiments. A more extensive list of endogenous genes encoding a traits of interest are listed below.

[0998] Use of AD-Functionalized Compositions to Modify Polyploid Plants

[0999] Many plants are polyploid, which means they carry duplicate copies of their genomes-sometimes as many as six, as in wheat. The methods according to the present invention, which make use of the AD-functionalized CRISPR system can be “multiplexed” to affect all copies of a gene, or to target dozens of genes at once. For instance, in particular embodiments, the methods of the present invention are used to simultaneously ensure a loss of function mutation in different genes responsible for suppressing defences against a disease. In particular embodiments, the methods of the present invention are used to simultaneously suppress the expression of the TaMLO-Al, TaMLO-Bi and TaMLO-Di nucleic acid sequence in a wheat plant cell and regenerating a wheat plant therefrom, in order to ensure that the wheat plant is resistant to powdery mildew (see also WO2015109752).

[1000] Examplary Genes Conferring Agronomic Traits

[1001] In particular embodiments, the invention encompasses methods which involve targeted A-G and T-C mutations in endogenous genes and their regulatory elements, such as listed below:

[1002] 1. Genes that Confer Resistance to Pests or Diseases:

[1003] Plant disease resistance genes. A plant can be transformed with cloned resistance genes to engineer plants that are resistant to specific pathogen strains. See, e.g., Jones et al., Science 266:789 (1994) (cloning of the tomato Cf-9 gene for resistance to Cladosporium fulvum); Martin et al., Science 262:1432 (1993) (tomato Pto gene for resistance to Pseudomonas syringae pv. tomato encodes a protein kinase); Mindrinos et al., Cell 78:1089 (1994) (Arabidopsmay be RSP2 gene for resistance to Pseudomonas syringae). A plant gene that is upregulated or down regulated during pathogen infection can be engineered for pathogen resistance. See, e.g., Thomazella et al., bioRxiv 064824; doi: https://doi.org/10.1101/064824 Epub. Jul. 23, 2016 (tomato plants with deletions in the SlDMR6-1 which is normally upregulated during pathogen infection).

[1004] Genes conferring resistance to a pest, such as soybean cyst nematode. See e.g., PCT Application WO 96/30517; PCT Application WO 93/19181.

[1005] Bacillus thuringiensis proteins see, e.g., Geiser et al., Gene 48:109 (1986).

[1006] Lectins, see, for example, Van Damme et al., Plant Molec. Biol. 24:25 (1994.

[1007] Vitamin-binding protein, such as avidin, see PCT application US93/06487, teaching the use of avidin and avidin homologues as larvicides against insect pests.

[1008] Enzyme inhibitors such as protease or proteinase inhibitors or amylase inhibitors. See, e.g., Abe et al., J. Biol. Chem. 262:16793 (1987), Huub et al., Plant Molec. Biol. 21:985 (1993)), Sumitani et al., Biosci. Biotech. Biochem. 57:1243 (1993) and U.S. Pat. No. 5,494,813.

[1009] Insect-specific hormones or pheromones such as ecdysteroid or juvenile hormone, a variant thereof, a mimetic based thereon, or an antagonist or agonist thereof. See, for example Hammock et al., Nature 344:458 (1990).

[1010] Insect-specific peptides or neuropeptides which, upon expression, disrupts the physiology of the affected pest. For example Regan, J. Biol. Chem. 269:9 (1994) and Pratt et al., Biochem. Biophys. Res. Comm. 163:1243 (1989). See also U.S. Pat. No. 5,266,317.

[1011] Insect-specific venom produced in nature by a snake, a wasp, or any other organism. For example, see Pang et al., Gene 116: 165 (1992).

[1012] Enzymes responsible for a hyperaccumulation of a monoterpene, a sesquiterpene, a steroid, hydroxamic acid, a phenylpropanoid derivative or another nonprotein molecule with insecticidal activity.

[1013] Enzymes involved in the modification, including the post-translational modification, of a biologically active molecule; for example, a glycolytic enzyme, a proteolytic enzyme, a lipolytic enzyme, a nuclease, a cyclase, a transaminase, an esterase, a hydrolase, a phosphatase, a kinase, a phosphorylase, a polymerase, an elastase, a chitinase and a glucanase, whether natural or synthetic. See PCT application WO93/02197, Kramer et al., Insect Biochem. Molec. Biol. 23:691 (1993) and Kawalleck et al., Plant Molec. Biol. 21:673 (1993).

[1014] Molecules that stimulates signal transduction. For example, see Botella et al., Plant Molec. Biol. 24:757 (1994), and Griess et al., Plant Physiol. 104:1467 (1994).

[1015] Viral-invasive proteins or a complex toxin derived therefrom. See Beachy et al., Ann. rev. Phytopathol. 28:451 (1990).

[1016] Developmental-arrestive proteins produced in nature by a pathogen or a parasite. See Lamb et al., Bio/Technology 10:1436 (1992) and Toubart et al., Plant J. 2:367 (1992).

[1017] A developmental-arrestive protein produced in nature by a plant. For example, Logemann et al., Bio/Technology 10:305 (1992).

[1018] In plants, pathogens are often host-specific. For example, some Fusarium species will causes tomato wilt but attacks only tomato, and other Fusarium species attack only wheat. Plants have existing and induced defenses to resist most pathogens. Mutations and recombination events across plant generations lead to genetic variability that gives rise to susceptibility, especially as pathogens reproduce with more frequency than plants. In plants there can be non-host resistance, e.g., the host and pathogen are incompatible or there can be partial resistance against all races of a pathogen, typically controlled by many genes and/or also complete resistance to some races of a pathogen but not to other races. Such resistance is typically controlled by a few genes. Using methods and components of the AD-functionalized CRISPR system, a new tool now exists to induce specific mutations in anticipation hereon. Accordingly, one can analyze the genome of sources of resistance genes, and in plants having desired characteristics or traits, use the method and components of the AD-functionalized CRISPR system to induce the rise of resistance genes. The present systems can do so with more precision than previous mutagenic agents and hence accelerate and improve plant breeding programs.

[1019] 2. Genes Involved in Plant Diseases, Such as Those Listed in WO 2013046247

[1020] Rice diseases: Magnaporthe grisea, Cochliobolus miyabeanus, Rhizoctonia solani, Gibberella fujikuroi; Wheat diseases: Erysiphe graminis, Fusarium graminearum, F. avenaceum, F. culmorum, Microdochium nivale, Puccinia striiformis, P. graminis, P. recondita, Micronectriella nivale, Typhula sp., Ustilago tritici, Tilletia caries, Pseudocercosporella herpotrichoides, Mycosphaerella graminicola, Stagonospora nodorum, Pyrenophora tritici-repentis; Barley diseases: Erysiphe graminis, Fusarium graminearum, F. avenaceum, F. culmorum, Microdochium nivale, Puccinia striiformis, P. graminis, P. hordei, Ustilago nuda, Rhynchosporium secalis, Pyrenophora teres, Cochliobolus sativus, Pyrenophora graminea, Rhizoctonia solani; Maize diseases: Ustilago maydis, Cochliobolus heterostrophus, Gloeocercospora sorghi, Puccinia polysora, Cercospora zeae-maydis, Rhizoctonia solani;

[1021] Citrus diseases: Diaporthe citri, Elsinoe fawcetti, Penicillium digitatum, P. italicum, Phytophthora parasitica, Phytophthora citrophthora; Apple diseases: Monilinia mali, Valsa ceratosperma, Podosphaera leucotricha, Alternaria alternata apple pathotype, Venturia inaequalis, Colletotrichum acutatum, Phytophtora cactorum;

[1022] Pear diseases: Venturia nashicola, V. pirina, Alternaria alternata Japanese pear pathotype, Gymnosporangium haraeanum, Phytophtora cactorum;

[1023] Peach diseases: Monilinia fructicola, Cladosporium carpophilum, Phomopsis sp.;

[1024] Grape diseases: Elsinoe ampelina, Glomerella cingulata, Uninula necator, Phakopsora ampelopsidis, Guignardia bidwellii, Plasmopara viticola;

[1025] Persimmon diseases: Gloesporium kaki, Cercospora kaki, Mycosphaerela nawae;

[1026] Gourd diseases: Colletotrichum lagenarium, Sphaerotheca fuliginea, Mycosphaerella melonis, Fusarium oxysporum, Pseudoperonospora cubensis, Phytophthora sp., Pythium sp.;

[1027] Tomato diseases: Alternaria solani, Cladosporium fulvum, Phytophthora infestans; Pseudomonas syringae pv. Tomato; Phytophthora capsici; Xanthomonas

[1028] Eggplant diseases: Phomopsis vexans, Erysiphe cichoracearum; Brassicaceous vegetable diseases: Alternaria japonica, Cercosporella brassicae, Plasmodiophora brassicae, Peronospora parasitica;

[1029] Welsh onion diseases: Puccinia allii, Peronospora destructor;

[1030] Soybean diseases: Cercospora kikuchii, Elsinoe glycines, Diaporthe phaseolorum var. sojae, Septoria glycines, Cercospora sojina, Phakopsora pachyrhizi, Phytophthora sojae, Rhizoctonia solani, Corynespora casiicola, Sclerotinia sclerotiorum;

[1031] Kidney bean diseases: Colletrichum lindemthianum;

[1032] Peanut diseases: Cercospora personata, Cercospora arachidicola, Sclerotium rolfsii;

[1033] Pea diseases pea: Erysiphe pisi;

[1034] Potato diseases: Alternaria solani, Phytophthora infestans, Phytophthora erythroseptica, Spongospora subterranean, f. sp. Subterranean;

[1035] Strawberry diseases: Sphaerotheca humuli, Glomerella cingulata;

[1036] Tea diseases: Exobasidium reticulatum, Elsinoe leucospila, Pestalotiopsis sp., Colletotrichum theae-sinensis;

[1037] Tobacco diseases: Alternaria longipes, Erysiphe cichoracearum, Colletotrichum tabacum, Peronospora tabacina, Phytophthora nicotianae;

[1038] Rapeseed diseases: Sclerotinia sclerotiorum, Rhizoctonia solani;

[1039] Cotton diseases: Rhizoctonia solani;

[1040] Beet diseases: Cercospora beticola, Thanatephorus cucumeris, Thanatephorus cucumeris, Aphanomyces cochlioides;

[1041] Rose diseases: Diplocarpon rosae, Sphaerotheca pannosa, Peronospora sparsa;

[1042] Diseases of chrysanthemum and asteraceae: Bremia lactuca, Septoria chrysanthemi-indici, Puccinia horiana;

[1043] Diseases of various plants: Pythium aphanidermatum, Pythium debarianum, Pythium graminicola, Pythium irregulare, Pythium ultimum, Botrytis cinerea, Sclerotinia sclerotiorum;

[1044] Radish diseases: Alternaria brassicicola;

[1045] Zoysia diseases: Sclerotinia homeocarpa, Rhizoctonia solani;

[1046] Banana diseases: Mycosphaerella fijiensis, Mycosphaerella musicola;

[1047] Sunflower diseases: Plasmopara halstedii;

[1048] Seed diseases or diseases in the initial stage of growth of various plants caused by Aspergillus spp., Penicillium spp., Fusarium spp., Gibberella spp., Tricoderma spp., Thielaviopsis spp., Rhizopus spp., Mucor spp., Corticium spp., Rhoma spp., Rhizoctonia spp., Diplodia spp., or the like;

[1049] Virus diseases of various plants mediated by Polymixa spp., Olpidium spp., or the like.

[1050] 3. Examples of Genes that Confer Resistance to Herbicides:

[1051] Resistance to herbicides that inhibit the growing point or meristem, such as an imidazolinone or a sulfonylurea, for example, by Lee et al., EMBO J. 7:1241 (1988), and Miki et al., Theor. Appl. Genet. 80:449 (1990), respectively.

[1052] Glyphosate tolerance (resistance conferred by, e.g., mutant 5-enolpyruvylshikimate-3-phosphate synthase (EPSPs) genes, aroA genes and glyphosate acetyl transferase (GAT) genes, respectively), or resistance to other phosphono compounds such as by glufosinate (phosphinothricin acetyl transferase (PAT) genes from Streptomyces species, including Streptomyces hygroscopicus and Streptomyces viridichromogenes), and to pyridinoxy or phenoxy proprionic acids and cyclohexones by ACCase inhibitor-encoding genes. See, for example, U.S. Pat. Nos. 4,940,835 and 6,248,876, U.S. Pat. No. 4,769,061, EP No. 0 333 033 and U.S. Pat. No. 4,975,374. See also EP No. 0242246, DeGreef et al., Bio/Technology 7:61 (1989), Marshall et al., Theor. Appl. Genet. 83:435 (1992), WO 2005012515 to Castle et. al. and WO 2005107437.

[1053] Resistance to herbicides that inhibit photosynthesis, such as a triazine (psbA and gs+ genes) or a benzonitrile (nitrilase gene), and glutathione S-transferase in Przibila et al., Plant Cell 3:169 (1991), U.S. Pat. No. 4,810,648, and Hayes et al., Biochem. J. 285: 173 (1992).

[1054] Genes encoding Enzymes detoxifying the herbicide or a mutant glutamine synthase enzyme that is resistant to inhibition, e.g. n U.S. patent application Ser. No. 11/760,602. Or a detoxifying enzyme is an enzyme encoding a phosphinothricin acetyltransferase (such as the bar or pat protein from Streptomyces species). Phosphinothricin acetyltransferases are for example described in U.S. Pat. Nos. 5,561,236; 5,648,477; 5,646,024; 5,273,894; 5,637,489; 5,276,268; 5,739,082; 5,908,810 and 7,112,665.

[1055] Hydroxyphenylpyruvatedioxygenases (HPPD) inhibitors, naturally occuring HPPD resistant enzymes, or genes encoding a mutated or chimeric HPPD enzyme as described in WO 96/38567, WO 99/24585, and WO 99/24586, WO 2009/144079, WO 2002/046387, or U.S. Pat. No. 6,768,044.

[1056] 4. Examples of Genes Involved in Abiotic Stress Tolerance:

[1057] Transgene capable of reducing the expression and/or the activity of poly(ADP-ribose) polymerase (PARP) gene in the plant cells or plants as described in WO 00/04173 or, WO/2006/045633.

[1058] Transgenes capable of reducing the expression and/or the activity of the PARG encoding genes of the plants or plants cells, as described e.g. in WO 2004/090140.

[1059] Transgenes coding for a plant-functional enzyme of the nicotineamide adenine dinucleotide salvage synthesis pathway including nicotinamidase, nicotinate phosphoribosyltransferase, nicotinic acid mononucleotide adenyl transferase, nicotinamide adenine dinucleotide synthetase or nicotine amide phosphorybosyltransferase as described e.g. in EP 04077624.7, WO 2006/133827, PCT/EP07/002,433, EP 1999263, or WO 2007/107326.

[1060] Enzymes involved in carbohydrate biosynthesis include those described in e.g. EP 0571427, WO 95/04826, EP 0719338, WO 96/15248, WO 96/19581, WO 96/27674, WO 97/11188, WO 97/26362, WO 97/32985, WO 97/42328, WO 97/44472, WO 97/45545, WO 98/27212, WO 98/40503, WO99/58688, WO 99/58690, WO 99/58654, WO 00/08184, WO 00/08185, WO 00/08175, WO 00/28052, WO 00/77229, WO 01/12782, WO 01/12826, WO 02/101059, WO 03/071860, WO 2004/056999, WO 2005/030942, WO 2005/030941, WO 2005/095632, WO 2005/095617, WO 2005/095619, WO 2005/095618, WO 2005/123927, WO 2006/018319, WO 2006/103107, WO 2006/108702, WO 2007/009823, WO 00/22140, WO 2006/063862, WO 2006/072603, WO 02/034923, EP 06090134.5, EP 06090228.5, EP 06090227.7, EP 07090007.1, EP 07090009.7, WO 01/14569, WO 02/79410, WO 03/33540, WO 2004/078983, WO 01/19975, WO 95/26407, WO 96/34968, WO 98/20145, WO 99/12950, WO 99/66050, WO 99/53072, U.S. Pat. No. 6,734,341, WO 00/11192, WO 98/22604, WO 98/32326, WO 01/98509, WO 01/98509, WO 2005/002359, U.S. Pat. Nos. 5,824,790, 6,013,861, WO 94/04693, WO 94/09144, WO 94/11520, WO 95/35026 or WO 97/20936 or enzymes involved in the production of polyfructose, especially of the inulin and levan-type, as disclosed in EP 0663956, WO 96/01904, WO 96/21023, WO 98/39460, and WO 99/24593, the production of alpha-1,4-glucans as disclosed in WO 95/31553, US 2002031826, U.S. Pat. Nos. 6,284,479, 5,712,107, WO 97/47806, WO 97/47807, WO 97/47808 and WO 00/14249, the production of alpha-1,6 branched alpha-1,4-glucans, as disclosed in WO 00/73422, the production of alternan, as disclosed in e.g. WO 00/47727, WO 00/73422, EP 06077301.7, U.S. Pat. No. 5,908,975 and EP 0728213, the production of hyaluronan, as for example disclosed in WO 2006/032538, WO 2007/039314, WO 2007/039315, WO 2007/039316, JP 2006304779, and WO 2005/012529.

[1061] Genes that improve drought resistance. For example, WO 2013122472 discloses that the absence or reduced level of functional Ubiquitin Protein Ligase protein (UPL) protein, more specifically, UPL3, leads to a decreased need for water or improved resistance to drought of said plant. Other examples of transgenic plants with increased drought tolerance are disclosed in, for example, US 2009/0144850, US 2007/0266453, and WO 2002/083911. US2009/0144850 describes a plant displaying a drought tolerance phenotype due to altered expression of a DR02 nucleic acid. US 2007/0266453 describes a plant displaying a drought tolerance phenotype due to altered expression of a DR03 nucleic acid and WO 2002/08391 1 describes a plant having an increased tolerance to drought stress due to a reduced activity of an ABC transporter which is expressed in guard cells. Another example is the work by Kasuga and co-authors (1999), who describe that overexpression of cDNA encoding DREB1 A in transgenic plants activated the expression of many stress tolerance genes under normal growing conditions and resulted in improved tolerance to drought, salt loading, and freezing. However, the expression of DREB1A also resulted in severe growth retardation under normal growing conditions (Kasuga (1999) Nat Biotechnol 17(3) 287-291).

[1062] In further particular embodiments, crop plants can be improved by influencing specific plant traits. For example, by developing pesticide-resistant plants, improving disease resistance in plants, improving plant insect and nematode resistance, improving plant resistance against parasitic weeds, improving plant drought tolerance, improving plant nutritional value, improving plant stress tolerance, avoiding self-pollination, plant forage digestibility biomass, grain yield etc. A few specific non-limiting examples are provided hereinbelow.

[1063] In addition to targeted mutation of single genes, AD-functionalized CRISPR system can be designed to allow targeted mutation of multiple genes, deletion of chromosomal fragment, site-specific integration of transgene, site-directed mutagenesis in vivo, and precise gene replacement or allele swapping in plants. Therefore, the methods described herein have broad applications in gene discovery and validation, mutational and cisgenic breeding, and hybrid breeding. These applications facilitate the production of a new generation of genetically modified crops with various improved agronomic traits such as herbicide resistance, disease resistance, abiotic stress tolerance, high yield, and superior quality.

[1064] Use of AD-Functionalized Compositions to Create Male Sterile Plants

[1065] Hybrid plants typically have advantageous agronomic traits compared to inbred plants. However, for self-pollinating plants, the generation of hybrids can be challenging. In different plant types, genes have been identified which are important for plant fertility, more particularly male fertility. For instance, in maize, at least two genes have been identified which are important in fertility (Amitabh Mohanty International Conference on New Plant Breeding Molecular Technologies Technology Development And Regulation, Oct. 9-10, 2014, Jaipur, India; Svitashev et al. Plant Physiol. 2015 October; 169(2):931-45; Djukanovic et al. Plant J. 2013 December; 76(5):888-99). The methods and systems provided herein can be used to target genes required for male fertility so as to generate male sterile plants which can easily be crossed to generate hybrids. In particular embodiments, the AD-functionalized CRISPR system provided herein is used for targeted mutagenesis of the cytochrome P450-like gene (MS26) or the meganuclease gene (MS45) thereby conferring male sterility to the maize plant. Maize plants which are as such genetically altered can be used in hybrid breeding programs.

[1066] Increasing the Fertility Stage in Plants

[1067] In particular embodiments, the methods and systems provided herein are used to prolong the fertility stage of a plant such as of a rice plant. For instance, a rice fertility stage gene such as Ehd3 can be targeted in order to generate a mutation in the gene and plantlets can be selected for a prolonged regeneration plant fertility stage (as described in CN 104004782)

[1068] Use of AD-Functionalized Compositions to Generate Genetic Variation in a Crop of Interest

[1069] The availability of wild germplasm and genetic variations in crop plants is the key to crop improvement programs, but the available diversity in germplasms from crop plants is limited. The present invention envisages methods for generating a diversity of genetic variations in a germplasm of interest. In this application of the AD-functionalized CRISPR system a library of guide RNAs targeting different locations in the plant genome is provided and is introduced into plant cells together with the CRISPR-Cas protein and adenosine deaminase. In this way a collection of genome-scale point mutations and gene knock-outs can be generated. In particular embodiments, the methods comprise generating a plant part or plant from the cells so obtained and screening the cells for a trait of interest. The target genes can include both coding and non-coding regions. In particular embodiments, the trait is stress tolerance and the method is a method for the generation of stress-tolerant crop varieties

[1070] Use of AD-Functionalized Compositions to Affect Fruit-Ripening

[1071] Ripening is a normal phase in the maturation process of fruits and vegetables. Only a few days after it starts it renders a fruit or vegetable inedible. This process brings significant losses to both farmers and consumers. In particular embodiments, the methods of the present invention are used to reduce ethylene production. This is ensured by ensuring one or more of the following: a. Suppression of ACC synthase gene expression. ACC (1-aminocyclopropane-1-carboxylic acid) synthase is the enzyme responsible for the conversion of S-adenosylmethionine (SAM) to ACC; the second to the last step in ethylene biosynthesis. Enzyme expression is hindered when an antisense (“mirror-image”) or truncated copy of the synthase gene is inserted into the plant's genome; b. Insertion of the ACC deaminase gene. The gene coding for the enzyme is obtained from Pseudomonas chlororaphis, a common nonpathogenic soil bacterium. It converts ACC to a different compound thereby reducing the amount of ACC available for ethylene production; c. Insertion of the SAM hydrolase gene. This approach is similar to ACC deaminase wherein ethylene production is hindered when the amount of its precursor metabolite is reduced; in this case SAM is converted to homoserine. The gene coding for the enzyme is obtained from E. coli T3 bacteriophage and d. Suppression of ACC oxidase gene expression. ACC oxidase is the enzyme which catalyzes the oxidation of ACC to ethylene, the last step in the ethylene biosynthetic pathway. Using the methods described herein, down regulation of the ACC oxidase gene results in the suppression of ethylene production, thereby delaying fruit ripening. In particular embodiments, additionally or alternatively to the modifications described above, the methods described herein are used to modify ethylene receptors, so as to interfere with ethylene signals obtained by the fruit. In particular embodiments, expression of the ETR1 gene, encoding an ethylene binding protein is modified, more particularly suppressed. In particular embodiments, additionally or alternatively to the modifications described above, the methods described herein are used to modify expression of the gene encoding Polygalacturonase (PG), which is the enzyme responsible for the breakdown of pectin, the substance that maintains the integrity of plant cell walls. Pectin breakdown occurs at the start of the ripening process resulting in the softening of the fruit. Accordingly, in particular embodiments, the methods described herein are used to introduce a mutation in the PG gene or to suppress activation of the PG gene in order to reduce the amount of PG enzyme produced thereby delaying pectin degradation.

[1072] Thus in particular embodiments, the methods comprise the use of the AD-functionalized CRISPR system to ensure one or more modifications of the genome of a plant cell such as described above, and regenerating a plant therefrom. In particular embodiments, the plant is a tomato plant.

[1073] Increasing Storage Life of Plants

[1074] In particular embodiments, the methods of the present invention are used to modify genes involved in the production of compounds which affect storage life of the plant or plant part. More particularly, the modification is in a gene that prevents the accumulation of reducing sugars in potato tubers. Upon high-temperature processing, these reducing sugars react with free amino acids, resulting in brown, bitter-tasting products and elevated levels of acrylamide, which is a potential carcinogen. In particular embodiments, the methods provided herein are used to reduce or inhibit expression of the vacuolar invertase gene (VInv), which encodes a protein that breaks down sucrose to glucose and fructose (Clasen et al. DOI: 10.1111/pbi.12370).

[1075] The Use of the AD-Functionalized Compositions to Ensure a Value Added Trait

[1076] In particular embodiments the AD-functionalized CRISPR system is used to produce nutritionally improved agricultural crops. In particular embodiments, the methods provided herein are adapted to generate “functional foods”, i.e. a modified food or food ingredient that may provide a health benefit beyond the traditional nutrients it contains and or “nutraceutical”, i.e. substances that may be considered a food or part of a food and provides health benefits, including the prevention and treatment of disease. In particular embodiments, the nutraceutical is useful in the prevention and/or treatment of one or more of cancer, diabetes, cardiovascular disease, and hypertension.

[1077] Examples of nutritionally improved crops include (Newell-McGloughlin, Plant Physiology, July 2008, Vol. 147, pp. 939-953):

[1078] Modified protein quality, content and/or amino acid composition, such as have been described for Bahiagrass (Luciani et al. 2005, Florida Genetics Conference Poster), Canola (Roesler et al., 1997, Plant Physiol 113 75-81), Maize (Cromwell et al, 1967, 1969 J Anim Sci 26 1325-1331, O'Quin et al. 2000 J Anim Sci 78 2144-2149, Yang et al. 2002, Transgenic Res 11 11-20, Young et al. 2004, Plant J 38 910-922), Potato (Yu J and Ao, 1997 Acta Bot Sin 39 329-334; Chakraborty et al. 2000, Proc Natl Acad Sci USA 97 3724-3729; Li et al. 2001) Chin Sci Bull 46 482-484, Rice (Katsube et al. 1999, Plant Physiol 120 1063-1074), Soybean (Dinkins et al. 2001, Rapp 2002, In Vitro Cell Dev Biol Plant 37 742-747), Sweet Potato (Egnin and Prakash 1997, In Vitro Cell Dev Biol 33 52A).

[1079] Essential amino acid content, such as has been described for Canola (Falco et al. 1995, Bio/Technology 13 577-582), Lupin (White et al. 2001, J Sci Food Agric 81 147-154), Maize (Lai and Messing, 2002, Agbios 2008 GM crop database (Mar. 11, 2008)), Potato (Zeh et al. 2001, Plant Physiol 127 792-802), Sorghum (Zhao et al. 2003, Kluwer Academic Publishers, Dordrecht, The Netherlands, pp 413-416), Soybean (Falco et al. 1995 Bio/Technology 13 577-582; Galili et al. 2002 Crit Rev Plant Sci 21 167-204).

[1080] Oils and Fatty acids such as for Canola (Dehesh et al. (1996) Plant J 9 167-172 [PubMed]; Del Vecchio (1996) INFORM International News on Fats, Oils and Related Materials 7 230-243; Roesler et al. (1997) Plant Physiol 113 75-81 [PMC free article][PubMed]; Froman and Ursin (2002, 2003) Abstracts of Papers of the American Chemical Society 223 U35; James et al. (2003) Am J Clin Nutr 77 1140-1145 [PubMed]; Agbios (2008, above); coton (Chapman et al. (2001). J Am Oil Chem Soc 78 941-947; Liu et al. (2002) J Am Coll Nutr 21 205S-211S [PubMed]; O'Neill (2007) Australian Life Scientist. http://www.biotechnews.com.au/index.php/id; 866694817; fp; 4; fpid; 2(Jun. 17, 2008), Linseed (Abbadi et al., 2004, Plant Cell 16: 2734-2748), Maize (Young et al., 2004, Plant J 38 910-922), oil palm (Jalani et al. 1997, J Am Oil Chem Soc 74 1451-1455; Parveez, 2003, AgBiotechNet 113 1-8), Rice (Anai et al., 2003, Plant Cell Rep 21988-992), Soybean (Reddy and Thomas, 1996, Nat Biotechnol 14 639-642; Kinney and Kwolton, 1998, Blackie Academic and Professional, London, pp 193-213), Sunflower (Arcadia, Biosciences 2008)

[1081] Carbohydrates, such as Fructans described for Chicory (Smeekens (1997) Trends Plant Sci 2 286-287, Sprenger et al. (1997) FEBS Lett 400 355-358, Sévenier et al. (1998) Nat Biotechnol 16 843-846), Maize (Caimi et al. (1996) Plant Physiol 110 355-363), Potato (Hellwege et al., 1997 Plant J 12 1057-1065), Sugar Beet (Smeekens et al. 1997, above), Inulin, such as described for Potato (Hellewege et al. 2000, Proc Natl Acad Sci USA 97 8699-8704), Starch, such as described for Rice (Schwall et al. (2000) Nat Biotechnol 18 551-554, Chiang et al. (2005) Mol Breed 15 125-143),

[1082] Vitamins and carotenoids, such as described for Canola (Shintani and DellaPenna (1998) Science 282 2098-2100), Maize (Rocheford et al. (2002). J Am Coll Nutr 21 191S-198S, Cahoon et al. (2003) Nat Biotechnol 21 1082-1087, Chen et al. (2003) Proc Natl Acad Sci USA 100 3525-3530), Mustardseed (Shewmaker et al. (1999) Plant J 20 401-412, Potato (Ducreux et al., 2005, J Exp Bot 56 81-89), Rice (Ye et al. (2000) Science 287 303-305, Strawberry (Agius et al. (2003), Nat Biotechnol 21 177-181), Tomato (Rosati et al. (2000) Plant J 24 413-419, Fraser et al. (2001) J Sci Food Agric 81 822-827, Mehta et al. (2002) Nat Biotechnol 20 613-618, Diaz de la Garza et al. (2004) Proc Natl Acad Sci USA 101 13720-13725, Enfissi et al. (2005) Plant Biotechnol J 3 17-27, DellaPenna (2007) Proc Natl Acad Sci USA 104 3675-3676.

[1083] Functional secondary metabolites, such as described for Apple (stilbenes, Szankowski et al. (2003) Plant Cell Rep 22: 141-149), Alfalfa (resveratrol, Hipskind and Paiva (2000) Mol Plant Microbe Interact 13 551-562), Kiwi (resveratrol, Kobayashi et al. (2000) Plant Cell Rep 19 904-910), Maize and Soybean (flavonoids, Yu et al. (2000) Plant Physiol 124 781-794), Potato (anthocyanin and alkaloid glycoside, Lukaszewicz et al. (2004) J Agric Food Chem 52 1526-1533), Rice (flavonoids & resveratrol, Stark-Lorenzen et al. (1997) Plant Cell Rep 16 668-673, Shin et al. (2006) Plant Biotechnol J 4 303-315), Tomato (+resveratrol, chlorogenic acid, flavonoids, stilbene; Rosati et al. (2000) above, Muir et al. (2001) Nature 19 470-474, Niggeweg et al. (2004) Nat Biotechnol 22 746-754, Giovinazzo et al. (2005) Plant Biotechnol J 3 57-69), wheat (caffeic and ferulic acids, resveratrol; United Press International (2002)); and

[1084] Mineral availabilities such as described for Alfalfa (phytase, Austin-Phillips et al. (1999) http://www.molecularfarming.com/nonmedical.html), Lettuse (iron, Goto et al. (2000) Theor Appl Genet 100 658-664), Rice (iron, Lucca et al. (2002) J Am Coll Nutr 21 184S-190S), Maize, Soybean and wheate (phytase, Drakakaki et al. (2005) Plant Mol Biol 59 869-880, Denbow et al. (1998) Poult Sci 77 878-881, Brinch-Pedersen et al. (2000) Mol Breed 6 195-206).

[1085] In particular embodiments, the value-added trait is related to the envisaged health benefits of the compounds present in the plant. For instance, in particular embodiments, the value-added crop is obtained by applying the methods of the invention to ensure the modification of or induce/increase the synthesis of one or more of the following compounds:
[1086] Carotenoids, such as α-Carotene present in carrots which Neutralizes free radicals that may cause damage to cells or β-Carotene present in various fruits and vegetables which neutralizes free radicals;
[1087] Lutein present in green vegetables which contributes to maintenance of healthy vision;
[1088] Lycopene present in tomato and tomato products, which is believed to reduce the risk of prostate cancer;
[1089] Zeaxanthin, present in citrus and maize, which contributes to mainteance of healthy vision
[1090] Dietary fiber such as insoluble fiber present in wheat bran which may reduce the risk of breast and/or colon cancer and β-Glucan present in oat, soluble fiber present in Psylium and whole cereal grains which may reduce the risk of cardiovascular disease (CVD);
[1091] Fatty acids, such as ω-3 fatty acids which may reduce the risk of CVD and improve mental and visual functions, Conjugated linoleic acid, which may improve body composition, may decrease risk of certain cancers and GLA which may reduce inflammation risk of cancer and CVD, may improve body composition;
[1092] Flavonoids such as Hydroxycinnamates, present in wheat which have Antioxidant-like activities, may reduce risk of degenerative diseases, flavonols, catechins and tannins present in fruits and vegetables which neutralize free radicals and may reduce risk of cancer;
[1093] Glucosinolates, indoles, isothiocyanates, such as Sulforaphane, present in Cruciferous vegetables (broccoli, kale), horseradish, which neutralize free radicals, may reduce risk of cancer;
[1094] Phenolics, such as stilbenes present in grape which May reduce risk of degenerative diseases, heart disease, and cancer, may have longevity effect and caffeic acid and ferulic acid present in vegetables and citrus which have Antioxidant-like activities, may reduce risk of degenerative diseases, heart disease, and eye disease, and epicatechin present in cacao which has Antioxidant-like activities, may reduce risk of degenerative diseases and heart disease;
[1095] Plant stanols/sterols present in maize, soy, wheat and wooden oils which May reduce risk of coronary heart disease by lowering blood cholesterol levels;
[1096] Fructans, inulins, fructo-oligosaccharides present in Jerusalem artichoke, shallot, onion powder which may improve gastrointestinal health;
[1097] Saponins present in soybean, which may lower LDL cholesterol;
[1098] Soybean protein present in soybean which may reduce risk of heart disease;
[1099] Phytoestrogens such as isoflavones present in soybean which May reduce menopause symptoms, such as hot flashes, may reduce osteoporosis and CVD and lignans present in flax, rye and vegetables, which May protect against heart disease and some cancers, may lower LDL cholesterol, total cholesterol;
[1100] Sulfides and thiols such as diallyl sulphide present in onion, garlic, olive, leek and scallon and Allyl methyl trisulfide, dithiolthiones present in cruciferous vegetables which may lower LDL cholesterol, helps to maintain healthy immune system; and
[1101] Tannins, such as proanthocyanidins, present in cranberry, cocoa, which may improve urinary tract health, may reduce risk of CVD and high blood pressure.

[1102] In addition, the methods of the present invention also envisage modifying protein/starch functionality, shelf life, taste/aesthetics, fiber quality, and allergen, antinutrient, and toxin reduction traits.

[1103] Accordingly, the invention encompasses methods for producing plants with nutritional added value, said methods comprising introducing into a plant cell a gene encoding an enzyme involved in the production of a component of added nutritional value using the AD-functionalized CRISPR system as described herein and regenerating a plant from said plant cell, said plant characterized in an increase expression of said component of added nutritional value. In particular embodiments, the AD-functionalized CRISPR system is used to modify the endogenous synthesis of these compounds indirectly, e.g. by modifying one or more transcription factors that controls the metabolism of this compound. Methods for introducing a gene of interest into a plant cell and/or modifying an endogenous gene using the AD-functionalized CRISPR system are described herein above.

[1104] Some specific examples of modifications in plants that have been modified to confer value-added traits are: plants with modified fatty acid metabolism, for example, by transforming a plant with an antisense gene of stearyl-ACP desaturase to increase stearic acid content of the plant. See Knultzon et al., Proc. Natl. Acad. Sci. U.S.A. 89:2624 (1992). Another example involves decreasing phytate content, for example by cloning and then reintroducing DNA associated with the single allele which may be responsible for maize mutants characterized by low levels of phytic acid. See Raboy et al, Maydica 35:383 (1990).

[1105] Similarly, expression of the maize (Zea mays) Tfs C1 and R, which regulate the production of flavonoids in maize aleurone layers under the control of a strong promoter, resulted in a high accumulation rate of anthocyanins in Arabidopsis (Arabidopsis thaliana), presumably by activating the entire pathway (Bruce et al., 2000, Plant Cell 12:65-80). DellaPenna (Welsch et al., 2007 Annu Rev Plant Biol 57: 711-738) found that Tf RAP2.2 and its interacting partner SINAT2 increased carotenogenesis in Arabidopsis leaves. Expressing the Tf Dof1 induced the up-regulation of genes encoding enzymes for carbon skeleton production, a marked increase of amino acid content, and a reduction of the Glc level in transgenic Arabidopsis (Yanagisawa, 2004 Plant Cell Physiol 45: 386-391), and the DOF Tf AtDof1.1 (OBP2) up-regulated all steps in the glucosinolate biosynthetic pathway in Arabidopsis (Skirycz et al., 2006 Plant J 47: 10-24).

[1106] Reducing Allergen in Plants

[1107] In particular embodiments the methods provided herein are used to generate plants with a reduced level of allergens, making them safer for the consumer. In particular embodiments, the methods comprise modifying expression of one or more genes responsible for the production of plant allergens. For instance, in particular embodiments, the methods comprise down-regulating expression of a Lol p5 gene in a plant cell, such as a ryegrass plant cell and regenerating a plant therefrom so as to reduce allergenicity of the pollen of said plant (Bhalla et al. 1999, Proc. Natl. Acad. Sci. USA Vol. 96: 11676-11680).

[1108] Peanut allergies and allergies to legumes generally are a real and serious health concern. The AD-functionalized CRISPR system of the present invention can be used to identify and then mutate genes encoding allergenic proteins of such legumes. Without limitation as to such genes and proteins, Nicolaou et al. identifies allergenic proteins in peanuts, soybeans, lentils, peas, lupin, green beans, and mung beans. See, Nicolaou et al., Current Opinion in Allergy and Clinical Immunology 2011; 11(3):222).

[1109] Screening Methods for Endogenous Genes of Interest

[1110] The methods provided herein further allow the identification of genes of value encoding enzymes involved in the production of a component of added nutritional value or generally genes affecting agronomic traits of interest, across species, phyla, and plant kingdom. By selectively targeting e.g. genes encoding enzymes of metabolic pathways in plants using the AD-functionalized CRISPR system as described herein, the genes responsible for certain nutritional aspects of a plant can be identified. Similarly, by selectively targeting genes which may affect a desirable agronomic trait, the relevant genes can be identified. Accordingly, the present invention encompasses screening methods for genes encoding enzymes involved in the production of compounds with a particular nutritional value and/or agronomic traits.

[1111] Use of AD-Functionalized CRISPR System in Biofuel Production

[1112] The term “biofuel” as used herein is an alternative fuel made from plant and plant-derived resources. Renewable biofuels can be extracted from organic matter whose energy has been obtained through a process of carbon fixation or are made through the use or conversion of biomass. This biomass can be used directly for biofuels or can be converted to convenient energy containing substances by thermal conversion, chemical conversion, and biochemical conversion. This biomass conversion can result in fuel in solid, liquid, or gas form. There are two types of biofuels: bioethanol and biodiesel. Bioethanol is mainly produced by the sugar fermentation process of cellulose (starch), which is mostly derived from maize and sugar cane. Biodiesel on the other hand is mainly produced from oil crops such as rapeseed, palm, and soybean. Biofuels are used mainly for transportation.

[1113] Enhancing Plant Properties for Biofuel Production

[1114] In particular embodiments, the methods using the AD-functionalized CRISPR system as described herein are used to alter the properties of the cell wall in order to facilitate access by key hydrolysing agents for a more efficient release of sugars for fermentation. In particular embodiments, the biosynthesis of cellulose and/or lignin are modified. Cellulose is the major component of the cell wall. The biosynthesis of cellulose and lignin are co-regulated. By reducing the proportion of lignin in a plant the proportion of cellulose can be increased. In particular embodiments, the methods described herein are used to downregulate lignin biosynthesis in the plant so as to increase fermentable carbohydrates. More particularly, the methods described herein are used to downregulate at least a first lignin biosynthesis gene selected from the group consisting of 4-coumarate 3-hydroxylase (C3H), phenylalanine ammonia-lyase (PAL), cinnamate 4-hydroxylase (C4H), hydroxycinnamoyl transferase (HCT), caffeic acid O-methyltransferase (COMT), caffeoyl CoA 3-O-methyltransferase (CCoAOMT), ferulate 5-hydroxylase (F5H), cinnamyl alcohol dehydrogenase (CAD), cinnamoyl CoA-reductase (CCR), 4-coumarate-CoA ligase (4CL), monolignol-lignin-specific glycosyltransferase, and aldehyde dehydrogenase (ALDH) as disclosed in WO 2008064289 A2.

[1115] In particular embodiments, the methods described herein are used to produce plant mass that produces lower levels of acetic acid during fermentation (see also WO 2010096488). More particularly, the methods disclosed herein are used to generate mutations in homologs to CaslL to reduce polysaccharide acetylation.

[1116] Modifying Yeast for Biofuel Production

[1117] In particular embodiments, the AD-functionalized CRISPR system provided herein is used for bioethanol production by recombinant micro-organisms. For instance, the AD-functionalized CRISPR system can be used to engineer micro-organisms, such as yeast, to generate biofuel or biopolymers from fermentable sugars and optionally to be able to degrade plant-derived lignocellulose derived from agricultural waste as a source of fermentable sugars. In some embodiments, the AD-functionalized CRISPR system is used to modify endogenous metabolic pathways which compete with the biofuel production pathway.

[1118] Accordingly, in more particular embodiments, the methods described herein are used to modify a micro-organism as follows: to modify at least one nucleic acid encoding for an enzyme in a metabolic pathway in said host cell, wherein said pathway produces a metabolite other than acetaldehyde from pyruvate or ethanol from acetaldehyde, and wherein said modification results in a reduced production of said metabolite, or to introduce at least one nucleic acid encoding for an inhibitor of said enzyme.

[1119] Modifying Algae and Plants for Production of Vegetable Oils or Biofuels

[1120] Transgenic algae or other plants such as rape may be particularly useful in the production of vegetable oils or biofuels such as alcohols (especially methanol and ethanol), for instance. These may be engineered to express or overexpress high levels of oil or alcohols for use in the oil or biofuel industries.

[1121] According to particular embodiments of the invention, the AD-functionalized CRISPR system is used to generate lipid-rich diatoms which are useful in biofuel production.

[1122] In particular embodiments it is envisaged to specifically modify genes that are involved in the modification of the quantity of lipids and/or the quality of the lipids produced by the algal cell. Examples of genes encoding enzymes involved in the pathways of fatty acid synthesis can encode proteins having for instance acetyl-CoA carboxylase, fatty acid synthase, 3-ketoacyl_acyl-carrier protein synthase III, glycerol-3-phospate deshydrogenase (G3PDH), Enoyl-acyl carrier protein reductase (Enoyl-ACP-reductase), glycerol-3-phosphate acyltransferase, lysophosphatidic acyl transferase or diacylglycerol acyltransferase, phospholipid:diacylglycerol acyltransferase, phoshatidate phosphatase, fatty acid thioesterase such as palmitoyi protein thioesterase, or malic enzyme activities. In further embodiments it is envisaged to generate diatoms that have increased lipid accumulation. This can be achieved by targeting genes that decrease lipid catabolisation. Of particular interest for use in the methods of the present invention are genes involved in the activation of both triacylglycerol and free fatty acids, as well as genes directly involved in β-oxidation of fatty acids, such as acyl-CoA synthetase, 3-ketoacyl-CoA thiolase, acyl-CoA oxidase activity and phosphoglucomutase. The AD-functionalized CRISPR system and methods described herein can be used to specifically activate such genes in diatoms as to increase their lipid content.

[1123] Organisms such as microalgae are widely used for synthetic biology. Stovicek et al. (Metab. Eng. Comm., 2015; 2:13 describes genome editing of industrial yeast, for example, Saccharomyces cerevisae, to efficiently produce robust strains for industrial production. Stovicek used a CRISPR-Cas9 system codon-optimized for yeast to simultaneously disrupt both alleles of an endogenous gene and knock in a heterologous gene. Cas9 and guide RNA were expressed from genomic or episomal 2μ-based vector locations. The authors also showed that gene disruption efficiency could be improved by optimization of the levels of Cas9 and guide RNA expression. Hlavová et al. (Biotechnol. Adv. 2015) discusses development of species or strains of microalgae using techniques such as CRISPR to target nuclear and chloroplast genes for insertional mutagenesis and screening.

[1124] U.S. Pat. No. 8,945,839 describes a method for engineering Micro-Algae (Chlamydomonas reinhardtii cells) species) using Cas9. Using similar tools, the methods of the AD-functionalized CRISPR system described herein can be applied on Chlamydomonas species and other algae. In particular embodiments, a CRISPR-Cas protein (e.g., Cas13), adenosine deaminase (which may be fused to the CRISPR-Cas protein or an aptamer-binding adaptor protein), and guide RNA are introduced in algae expressed using a vector that expresses the CRISPR-Cas protein and optionally the adenosine deaminase under the control of a constitutive promoter such as Hsp70A-Rbc S2 or Beta2-tubulin. Guide RNA will be delivered using a vector containing T7 promoter. Alternatively, mRNA and in vitro transcribed guide RNA can be delivered to algal cells. Electroporation protocol follows standard recommended protocol from the GeneArt Chlamydomonas Engineering kit.

[1125] The Use of AD-Functionalized Compositions in the Generation of Micro-Organisms Capable Offatty Acid Production

[1126] In particular embodiments, the methods of the invention are used for the generation of genetically engineered micro-organisms capable of the production of fatty esters, such as fatty acid methyl esters (“FAME”) and fatty acid ethyl esters (“FAEE”),

[1127] Typically, host cells can be engineered to produce fatty esters from a carbon source, such as an alcohol, present in the medium, by expression or overexpression of a gene encoding a thioesterase, a gene encoding an acyl-CoA synthase, and a gene encoding an ester synthase. Accordingly, the methods provided herein are used to modify a micro-organisms so as to overexpress or introduce a thioesterase gene, a gene encloding an acyl-CoA synthase, and a gene encoding an ester synthase. In particular embodiments, the thioesterase gene is selected from tesA, ‘tesA, tesB, fatB, fatB2, fatB3, fatA1, or fatA. In particular embodiments, the gene encoding an acyl-CoA synthase is selected from fadDJadK, BH3103, pfl-4354, EAV15023, fadD1, fadD2, RPC_4074, fadDD35, fadDD22, faa39, or an identified gene encoding an enzyme having the same properties. In particular embodiments, the gene encoding an ester synthase is a gene encoding a synthase/acyl-CoA:diacylglycerl acyltransferase from Simmondsia chinensis, Acinetobacter sp. ADP, Alcanivorax borkumensis, Pseudomonas aeruginosa, Fundibacter jadensis, Arabidopsis thaliana, or Alkaligenes eutrophus, or a variant thereof. Additionally or alternatively, the methods provided herein are used to decrease expression in said micro-organism of of at least one of a gene encoding an acyl-CoA dehydrogenase, a gene encoding an outer membrane protein receptor, and a gene encoding a transcriptional regulator of fatty acid biosynthesis. In particular embodiments one or more of these genes is inactivated, such as by introduction of a mutation. In particular embodiments, the gene encoding an acyl-CoA dehydrogenase is fadE. In particular embodiments, the gene encoding a transcriptional regulator of fatty acid biosynthesis encodes a DNA transcription repressor, for example, fabR.

[1128] Additionally or alternatively, said micro-organism is modified to reduce expression of at least one of a gene encoding a pyruvate formate lyase, a gene encoding a lactate dehydrogenase, or both. In particular embodiments, the gene encoding a pyruvate formate lyase is pflB. In particular embodiments, the gene encoding a lactate dehydrogenase is IdhA. In particular embodiments one or more of these genes is inactivated, such as by introduction of a mutation therein.

[1129] In particular embodiments, the micro-organism is selected from the genus Escherichia, Bacillus, Lactobacillus, Rhodococcus, Synechococcus, Synechoystis, Pseudomonas, Aspergillus, Trichoderma, Neurospora, Fusarium, Humicola, Rhizomucor, Kluyveromyces, Pichia, Mucor, Myceliophtora, Penicillium, Phanerochaete, Pleurotus, Trametes, Chrysosporium, Saccharomyces, Stenotrophamonas, Schizosaccharomyces, Yarrowia, or Streptomyces.

[1130] The Use of AD-Functionalized CRISPR System in the Generation of Micro-Organisms Capable of Organic Acid Production

[1131] The methods provided herein are further used to engineer micro-organisms capable of organic acid production, more particularly from pentose or hexose sugars. In particular embodiments, the methods comprise introducing into a micro-organism an exogenous LDH gene. In particular embodiments, the organic acid production in said micro-organisms is additionally or alternatively increased by inactivating endogenous genes encoding proteins involved in an endogenous metabolic pathway which produces a metabolite other than the organic acid of interest and/or wherein the endogenous metabolic pathway consumes the organic acid. In particular embodiments, the modification ensures that the production of the metabolite other than the organic acid of interest is reduced. According to particular embodiments, the methods are used to introduce at least one engineered gene deletion and/or inactivation of an endogenous pathway in which the organic acid is consumed or a gene encoding a product involved in an endogenous pathway which produces a metabolite other than the organic acid of interest. In particular embodiments, the at least one engineered gene deletion or inactivation is in one or more gene encoding an enzyme selected from the group consisting of pyruvate decarboxylase (pdc), fumarate reductase, alcohol dehydrogenase (adh), acetaldehyde dehydrogenase, phosphoenolpyruvate carboxylase (ppc), D-lactate dehydrogenase (d-ldh), L-lactate dehydrogenase (1-ldh), lactate 2-monooxygenase. In further embodiments the at least one engineered gene deletion and/or inactivation is in an endogenous gene encoding pyruvate decarboxylase (pdc).

[1132] In further embodiments, the micro-organism is engineered to produce lactic acid and the at least one engineered gene deletion and/or inactivation is in an endogenous gene encoding lactate dehydrogenase. Additionally or alternatively, the micro-organism comprises at least one engineered gene deletion or inactivation of an endogenous gene encoding a cytochrome-dependent lactate dehydrogenase, such as a cytochrome B2-dependent L-lactate dehydrogenase.

[1133] The Use of AD-Functionalized CRISPR System in the Generation of Improved Xylose or Cellobiose Utilizing Yeasts Strains

[1134] In particular embodiments, the AD-functionalized CRISPR system may be applied to select for improved xylose or cellobiose utilizing yeast strains. Error-prone PCR can be used to amplify one (or more) genes involved in the xylose utilization or cellobiose utilization pathways. Examples of genes involved in xylose utilization pathways and cellobiose utilization pathways may include, without limitation, those described in Ha, S. J., et al. (2011) Proc. Natl. Acad. Sci. USA 108(2):504-9 and Galazka, J. M., et al. (2010) Science 330(6000):84-6. Resulting libraries of double-stranded DNA molecules, each comprising a random mutation in such a selected gene could be co-transformed with the components of the AD-functionalized CRISPR system into a yeast strain (for instance S288C) and strains can be selected with enhanced xylose or cellobiose utilization capacity, as described in WO2015138855.

### The Use of AD-Functionalized CRISPR System in the Generation of Improved Yeasts Strains for Use in Isoprenoid Biosynthesis

[1135] Tadas Jakočiūnas et al. described the successful application of a multiplex CRISPR-Cas9 system for genome engineering of up to 5 different genomic loci in one transformation step in baker's yeast Saccharomyces cerevisiae (Metabolic Engineering Volume 28, March 2015, Pages 213-222) resulting in strains with high mevalonate production, a key intermediate for the industrially important isoprenoid biosynthesis pathway. In particular embodiments, the AD-functionalized CRISPR system may be applied in a multiplex genome engineering method as described herein for identifying additional high producing yeast strains for use in isoprenoid synthesis.

[1136] Improved Plants and Yeast Cells

[1137] The present invention also provides plants and yeast cells obtainable and obtained by the methods provided herein. The improved plants obtained by the methods described herein may be useful in food or feed production through expression of genes which, for instance ensure tolerance to plant pests, herbicides, drought, low or high temperatures, excessive water, etc.

[1138] The improved plants obtained by the methods described herein, especially crops and algae may be useful in food or feed production through expression of, for instance, higher protein, carbohydrate, nutrient or vitamin levels than would normally be seen in the wildtype. In this regard, improved plants, especially pulses and tubers are preferred.

[1139] Improved algae or other plants such as rape may be particularly useful in the production of vegetable oils or biofuels such as alcohols (especially methanol and ethanol), for instance. These may be engineered to express or overexpress high levels of oil or alcohols for use in the oil or biofuel industries.

[1140] The invention also provides for improved parts of a plant. Plant parts include, but are not limited to, leaves, stems, roots, tubers, seeds, endosperm, ovule, and pollen. Plant parts as envisaged herein may be viable, nonviable, regeneratable, and/or non-regeneratable.

[1141] It is also encompassed herein to provide plant cells and plants generated according to the methods of the invention. Gametes, seeds, embryos, either zygotic or somatic, progeny or hybrids of plants comprising the genetic modification, which are produced by traditional breeding methods, are also included within the scope of the present invention. Such plants may contain a heterologous or foreign DNA sequence inserted at or instead of a target sequence. Alternatively, such plants may contain only an alteration (mutation, deletion, insertion, substitution) in one or more nucleotides. As such, such plants will only be different from their progenitor plants by the presence of the particular modification.

[1142] Thus, the invention provides a plant, animal or cell, produced by the present methods, or a progeny thereof. The progeny may be a clone of the produced plant or animal, or may result from sexual reproduction by crossing with other individuals of the same species to introgress further desirable traits into their offspring. The cell may be in vivo or ex vivo in the cases of multicellular organisms, particularly animals or plants.

[1143] The methods for genome editing using the AD-functionalized CRISPR system as described herein can be used to confer desired traits on essentially any plant, algae, fungus, yeast, etc. A wide variety of plants, algae, fungus, yeast, etc and plant algae, fungus, yeast cell or tissue systems may be engineered for the desired physiological and agronomic characteristics described herein using the nucleic acid constructs of the present disclosure and the various transformation methods mentioned above.

[1144] In particular embodiments, the methods described herein are used to modify endogenous genes or to modify their expression without the permanent introduction into the genome of the plant, algae, fungus, yeast, etc of any foreign gene, including those encoding CRISPR components, so as to avoid the presence of foreign DNA in the genome of the plant. This can be of interest as the regulatory requirements for non-transgenic plants are less rigorous.

[1145] The methods described herein generally result in the generation of “improved plants, algae, fungi, yeast, etc” in that they have one or more desirable traits compared to the wildtype plant. In particular embodiments, non-transgenic genetically modified plants, algae, fungi, yeast, etc., parts or cells are obtained, in that no exogenous DNA sequence is incorporated into the genome of any of the cells of the plant. In such embodiments, the improved plants, algae, fungi, yeast, etc. are non-transgenic. Where only the modification of an endogenous gene is ensured and no foreign genes are introduced or maintained in the plant, algae, fungi, yeast, etc. genome, the resulting genetically modified crops contain no foreign genes and can thus basically be considered non-transgenic. The different applications of the AD-functionalized CRISPR system for plant, algae, fungi, yeast, etc. genome editing include, but are not limited to: editing of endogenous genes to confer an agricultural trait of interest. Exemplary genes conferring agronomic traits include, but are not limited to genes that confer resistance to pests or diseases; genes involved in plant diseases, such as those listed in WO 2013046247; genes that confer resistance to herbicides, fungicides, or the like; genes involved in (abiotic) stress tolerance. Other aspects of the use of the CRISPR-Cas system include, but are not limited to: create (male) sterile plants; increasing the fertility stage in plants/algae etc; generate genetic variation in a crop of interest; affect fruit-ripening; increasing storage life of plants/algae etc; reducing allergen in plants/algae etc; ensure a value added trait (e.g. nutritional improvement); Screening methods for endogenous genes of interest; biofuel, fatty acid, organic acid, etc production.

### AD-Functionalized Compositions can be Used in Non-Human Organisms

[1146] In an aspect, the invention provides a non-human eukaryotic organism; preferably a multicellular eukaryotic organism, comprising a eukaryotic host cell according to any of the described embodiments. In other aspects, the invention provides a eukaryotic organism; preferably a multicellular eukaryotic organism, comprising a eukaryotic host cell according to any of the described embodiments. The organism in some embodiments of these aspects may be an animal; for example a mammal. Also, the organism may be an arthropod such as an insect. The present invention may also be extended to other agricultural applications such as, for example, farm and production animals. For example, pigs have many features that make them attractive as biomedical models, especially in regenerative medicine. In particular, pigs with severe combined immunodeficiency (SCID) may provide useful models for regenerative medicine, xenotransplantation (discussed also elsewhere herein), and tumor development and will aid in developing therapies for human SCID patients. Lee et al., (Proc Natl Acad Sci USA. 2014 May 20; 111(20):7260-5) utilized a reporter-guided transcription activator-like effector nuclease (TALEN) system to generated targeted modifications of recombination activating gene (RAG) 2 in somatic cells at high efficiency, including some that affected both alleles. The AD-functionalized CRISPR system may be applied to a similar system.

[1147] The methods of Lee et al., (Proc Natl Acad Sci USA. 2014 May 20; 111(20):7260-5) may be applied to the present invention analogously as follows. Mutated pigs are produced by targeted modification of RAG2 in fetal fibroblast cells followed by SCNT and embryo transfer. Constructs coding for CRISPR Cas and a reporter are electroporated into fetal-derived fibroblast cells. After 48 h, transfected cells expressing the green fluorescent protein are sorted into individual wells of a 96-well plate at an estimated dilution of a single cell per well. Targeted modification of RAG2 are screened by amplifying a genomic DNA fragment flanking any CRISPR Cas cutting sites followed by sequencing the PCR products. After screening and ensuring lack of off-site mutations, cells carrying targeted modification of RAG2 are used for SCNT. The polar body, along with a portion of the adjacent cytoplasm of oocyte, presumably containing the metaphase II plate, are removed, and a donor cell are placed in the perivitelline. The reconstructed embryos are then electrically porated to fuse the donor cell with the oocyte and then chemically activated. The activated embryos are incubated in Porcine Zygote Medium 3 (PZM3) with 0.5 μM Scriptaid (S7817; Sigma-Aldrich) for 14-16 h. Embryos are then washed to remove the Scriptaid and cultured in PZM3 until they were transferred into the oviducts of surrogate pigs.

[1148] The present invention is used to create a platform to model a disease or disorder of an animal, in some embodiments a mammal, in some embodiments a human. In certain embodiments, such models and platforms are rodent based, in non-limiting examples rat or mouse. Such models and platforms can take advantage of distinctions among and comparisons between inbred rodent strains. In certain embodiments, such models and platforms primate, horse, cattle, sheep, goat, swine, dog, cat or bird-based, for example to directly model diseases and disorders of such animals or to create modified and/or improved lines of such animals. Advantageously, in certain embodiments, an animal based platform or model is created to mimic a human disease or disorder. For example, the similarities of swine to humans make swine an ideal platform for modeling human diseases. Compared to rodent models, development of swine models has been costly and time intensive. On the other hand, swine and other animals are much more similar to humans genetically, anatomically, physiologically and pathophysiologically. The present invention provides a high efficiency platform for targeted gene and genome editing, gene and genome modification and gene and genome regulation to be used in such animal platforms and models. Though ethical standards block development of human models and in many cases models based on non-human primates, the present invention is used with in vitro systems, including but not limited to cell culture systems, three dimensional models and systems, and organoids to mimic, model, and investigate genetics, anatomy, physiology and pathophysiology of structures, organs, and systems of humans. The platforms and models provide manipulation of single or multiple targets.

[1149] In certain embodiments, the present invention is applicable to disease models like that of Schomberg et al. (FASEB Journal, April 2016; 30(1):Suppl 571.1). To model the inherited disease neurofibromatosis type 1 (NF-1) Schomberg used CRISPR-Cas9 to introduce mutations in the swine neurofibromin 1 gene by cytosolic microinjection of CRISPR/Cas9 components into swine embryos. CRISPR guide RNAs (gRNA) were created for regions targeting sites both upstream and downstream of an exon within the gene for targeted cleavage by Cas9 and repair was mediated by a specific single-stranded oligodeoxynucleotide (ssODN) template to introduce a 2500 bp deletion. The CRISPR-Cas system was also used to engineer swine with specific NF-1 mutations or clusters of mutations, and futher can be used to engineer mutations that are specific to or representative of a given human individual. The invention is similarly used to develop animal models, including but not limited to swine models, of human multigenic diseases. According to the invention, multiple genetic loci in one gene or in multiple genes are simultaneously targeted using multiplexed guides and optionally one or multiple templates.

[1150] The present invention is also applicable to modifying SNPs of other animals, such as cows. Tan et al. (Proc Natl Acad Sci USA. 2013 Oct. 8; 110(41): 16526-16531) expanded the livestock gene editing toolbox to include transcription activator-like (TAL) effector nuclease (TALEN)- and clustered regularly interspaced short palindromic repeats (CRISPR)/Cas9-stimulated homology-directed repair (HDR) using plasmid, rAAV, and oligonucleotide templates. Gene specific guide RNA sequences were cloned into the Church lab guide RNA vector (Addgene ID: 41824) according to their methods (Mali P, et al. (2013) RNA-Guided Human Genome Engineering via Cas9. Science 339(6121):823-826). The Cas9 nuclease was provided either by co-transfection of the hCas9 plasmid (Addgene ID: 41815) or mRNA synthesized from RCIScript-hCas9. This RCIScript-hCas9 was constructed by sub-cloning the XbaI-AgeI fragment from the hCas9 plasmid (encompassing the hCas9 cDNA) into the RCIScript plasmid.

[1151] Heo et al. (Stem Cells Dev. 2015 Feb. 1; 24(3):393-402. doi: 10.1089/scd.2014.0278. Epub 2014 Nov. 3) reported highly efficient gene targeting in the bovine genome using bovine pluripotent cells and clustered regularly interspaced short palindromic repeat (CRISPR)/Cas9 nuclease. First, Heo et al. generate induced pluripotent stem cells (iPSCs) from bovine somatic fibroblasts by the ectopic expression of yamanaka factors and GSK3β and MEK inhibitor (2i) treatment. Heo et al. observed that these bovine iPSCs are highly similar to naïve pluripotent stem cells with regard to gene expression and developmental potential in teratomas. Moreover, CRISPR-Cas9 nuclease, which was specific for the bovine NANOG locus, showed highly efficient editing of the bovine genome in bovine iPSCs and embryos.

[1152] Igenity® provides a profile analysis of animals, such as cows, to perform and transmit traits of economic traits of economic importance, such as carcass composition, carcass quality, maternal and reproductive traits and average daily gain. The analysis of a comprehensive Igenity® profile begins with the discovery of DNA markers (most often single nucleotide polymorphisms or SNPs). All the markers behind the Igenity® profile were discovered by independent scientists at research institutions, including universities, research organizations, and government entities such as USDA. Markers are then analyzed at Igenity® in validation populations. Igenity® uses multiple resource populations that represent various production environments and biological types, often working with industry partners from the seedstock, cow-calf, feedlot and/or packing segments of the beef industry to collect phenotypes that are not commonly available. Cattle genome databases are widely available, see, e.g., the NAGRP Cattle Genome Coordination Program (http://www.animalgenome.org/cattle/maps/db.html). Thus, the present invention maybe applied to target bovine SNPs. One of skill in the art may utilize the above protocols for targeting SNPs and apply them to bovine SNPs as described, for example, by Tan et al. or Heo et al.

[1153] Qingjian Zou et al. (Journal of Molecular Cell Biology Advance Access published Oct. 12, 2015) demonstrated increased muscle mass in dogs by targeting targeting the first exon of the dog Myostatin (MSTN) gene (a negative regulator of skeletal muscle mass). First, the efficiency of the sgRNA was validated, using cotransfection of the the sgRNA targeting MSTN with a Cas9 vector into canine embryonic fibroblasts (CEFs). Thereafter, MSTN KO dogs were generated by micro-injecting embryos with normal morphology with a mixture of Cas9 mRNA and MSTN sgRNA and auto-transplantation of the zygotes into the oviduct of the same female dog. The knock-out puppies displayed an obvious muscular phenotype on thighs compared with its wild-type littermate sister. This can also be performed using the AD-functionalized CRISPR systems provided herein.

[1154] Livestock—Pigs

[1155] Viral targets in livestock may include, in some embodiments, porcine CD163, for example on porcine macrophages. CD163 is associated with infection (thought to be through viral cell entry) by PRRSv (Porcine Reproductive and Respiratory Syndrome virus, an arterivirus). Infection by PRRSv, especially of porcine alveolar macrophages (found in the lung), results in a previously incurable porcine syndrome (“Mystery swine disease” or “blue ear disease”) that causes suffering, including reproductive failure, weight loss and high mortality rates in domestic pigs. Opportunistic infections, such as enzootic pneumonia, meningitis and ear oedema, are often seen due to immune deficiency through loss of macrophage activity. It also has significant economic and environmental repercussions due to increased antibiotic use and financial loss (an estimated $660m per year).

[1156] As reported by Kristin M Whitworth and Dr Randall Prather et al. (Nature Biotech 3434 published online 7 Dec. 2015) at the University of Missouri and in collaboration with Genus Plc, CD163 was targeted using CRISPR-Cas9 and the offspring of edited pigs were resistant when exposed to PRRSv. One founder male and one founder female, both of whom had mutations in exon 7 of CD163, were bred to produce offspring. The founder male possessed an 11-bp deletion in exon 7 on one allele, which results in a frameshift mutation and missense translation at amino acid 45 in domain 5 and a subsequent premature stop codon at amino acid 64. The other allele had a 2-bp addition in exon 7 and a 377-bp deletion in the preceding intron, which were predicted to result in the expression of the first 49 amino acids of domain 5, followed by a premature stop code at amino acid 85. The sow had a 7 bp addition in one allele that when translated was predicted to express the first 48 amino acids of domain 5, followed by a premature stop codon at amino acid 70. The sow's other allele was unamplifiable. Selected offspring were predicted to be a null animal (CD163−/−), i.e. a CD163 knock out.

[1157] Accordingly, in some embodiments, porcine alveolar macrophages may be targeted by the CRISPR protein. In some embodiments, porcine CD163 may be targeted by the CRISPR protein. In some embodiments, porcine CD163 may be knocked out through induction of a DSB or through insertions or deletions, for example targeting deletion or modification of exon 7, including one or more of those described above, or in other regions of the gene, for example deletion or modification of exon 5.

[1158] An edited pig and its progeny are also envisaged, for example a CD163 knock out pig. This may be for livestock, breeding or modelling purposes (i.e. a porcine model). Semen comprising the gene knock out is also provided.

[1159] CD163 is a member of the scavenger receptor cysteine-rich (SRCR) superfamily. Based on in vitro studies SRCR domain 5 of the protein is the domain responsible for unpackaging and release of the viral genome. As such, other members of the SRCR superfamily may also be targeted in order to assess resistance to other viruses. PRRSV is also a member of the mammalian arterivirus group, which also includes murine lactate dehydrogenase-elevating virus, simian hemorrhagic fever virus and equine arteritis virus. The arteriviruses share important pathogenesis properties, including macrophage tropism and the capacity to cause both severe disease and persistent infection. Accordingly, arteriviruses, and in particular murine lactate dehydrogenase-elevating virus, simian hemorrhagic fever virus and equine arteritis virus, may be targeted, for example through porcine CD163 or homologues thereof in other species, and murine, simian and equine models and knockout also provided.

[1160] Indeed, this approach may be extended to viruses or bacteria that cause other livestock diseases that may be transmitted to humans, such as Swine Influenza Virus (SIV) strains which include influenza C and the subtypes of influenza A known as H1N1, H1N2, H2N1, H3N1, H3N2, and H2N3, as well as pneumonia, meningitis and oedema mentioned above.

[1161] In some embodiments, the AD-functionalized CRISPR system described herein can be used to genetically modify a pig genome to inactivate one or more porcine endogenous retrovirus (PERVs) loci to facilitate clinical application of porcine-to-human xenotransplantation. See Yang et al., Science 350(6264):1101-1104 (2015), which is incorporated herein by reference in its entirety. In some embodiments, the AD-functionalized CRISPR system described herein can be used to produce a genetically modified pig that does not comprise any active porcine endogenous retrovirus (PERVs) locus.

Therapeutic Targeting with AD-Functionalized Compositions

[1162] As will be apparent, it is envisaged that AD-functionalized CRISPR system can be used to target any polynucleotide sequence of interest. The invention provides a non-naturally occurring or engineered composition, or one or more polynucleotides encoding components of said composition, or vector or delivery systems comprising one or more polynucleotides encoding components of said composition for use in a modifying a target cell in vivo, ex vivo or in vitro and, may be conducted in a manner alters the cell such that once modified the progeny or cell line of the CRISPR modified cell retains the altered phenotype. The modified cells and progeny may be part of a multi-cellular organism such as a plant or animal with ex vivo or in vivo application of CRISPR system to desired cell types. The CRISPR invention may be a therapeutic method of treatment. The therapeutic method of treatment may comprise gene or genome editing, or gene therapy. Additional diseases that may be treated using the compositions and methods of the present invention are are further disclosed in ClinVar database (Landrum et al., Nucleic Acids Res. 2016 Jan. 4; 44(D1):D862-8; Landrum et al., Nucleic Acids Res. 2014 Jan. 1; 42(1):D980-5; http://www.ncbi.nlm.nih.gov/books/NBK174587/).

### Adoptive Cell Therapies

[1163] The present invention also contemplates use of the AD-functionalized CRISPR system described herein to modify cells for adoptive therapies. Aspects of the invention accordingly involve the adoptive transfer of immune system cells, such as T cells, specific for selected antigens, such as tumor associated antigens (see Maus et al., 2014, Adoptive Immunotherapy for Cancer or Viruses, Annual Review of Immunology, Vol. 32: 189-225; Rosenberg and Restifo, 2015, Adoptive cell transfer as personalized immunotherapy for human cancer, Science Vol. 348 no. 6230 pp. 62-68; and, Restifo et al., 2015, Adoptive immunotherapy for cancer: harnessing the T cell response. Nat. Rev. Immunol. 12(4): 269-281; and Jenson and Riddell, 2014, Design and implementation of adoptive therapy with chimeric antigen receptor-modified T cells. Immunol Rev. 257(1): 127-144). Various strategies may for example be employed to genetically modify T cells by altering the specificity of the T cell receptor (TCR) for example by introducing new TCR α and β chains with selected peptide specificity (see U.S. Pat. No. 8,697,854; PCT Patent Publications: WO2003020763, WO2004033685, WO2004044004, WO2005114215, WO2006000830, WO2008038002, WO2008039818, WO2004074322, WO2005113595, WO2006125962, WO2013166321, WO2013039889, WO2014018863, WO2014083173; U.S. Pat. No. 8,088,379).

[1164] As an alternative to, or addition to, TCR modifications, chimeric antigen receptors (CARs) may be used in order to generate immunoresponsive cells, such as T cells, specific for selected targets, such as malignant cells, with a wide variety of receptor chimera constructs having been described (see U.S. Pat. Nos. 5,843,728; 5,851,828; 5,912,170; 6,004,811; 6,284,240; 6,392,013; 6,410,014; 6,753,162; 8,211,422; and, PCT Publication WO9215322). Alternative CAR constructs may be characterized as belonging to successive generations. First-generation CARs typically consist of a single-chain variable fragment of an antibody specific for an antigen, for example comprising a VL linked to a VH of a specific antibody, linked by a flexible linker, for example by a CD8α hinge domain and a CD8α transmembrane domain, to the transmembrane and intracellular signaling domains of either CD3ζ or FcRγ (scFv-CD3ζ or scFv-FcRγ; see U.S. Pat. Nos. 7,741,465; 5,912,172; 5,906,936). Second-generation CARs incorporate the intracellular domains of one or more costimulatory molecules, such as CD28, OX40 (CD134), or 4-1BB (CD137) within the endodomain (for example scFv-CD28/OX40/4-1BB-CD3ζ; see U.S. Pat. Nos. 8,911,993; 8,916,381; 8,975,071; 9,101,584; 9,102,760; 9,102,761). Third-generation CARs include a combination of costimulatory endodomains, such a CD3ζ-chain, CD97, GDI 1a-CD18, CD2, ICOS, CD27, CD154, CDS, OX40, 4-1BB, or CD28 signaling domains (for example scFv-CD28-4-1BB-CD3ζ or scFv-CD28-OX40-CD3ζ; see U.S. Pat. Nos. 8,906,682; 8,399,645; 5,686,281; PCT Publication No. WO2014134165; PCT Publication No. WO2012079000). Alternatively, costimulation may be orchestrated by expressing CARs in antigen-specific T cells, chosen so as to be activated and expanded following engagement of their native αβTCR, for example by antigen on professional antigen-presenting cells, with attendant costimulation. In addition, additional engineered receptors may be provided on the immunoresponsive cells, for example to improve targeting of a T-cell attack and/or minimize side effects.

[1165] Alternative techniques may be used to transform target immunoresponsive cells, such as protoplast fusion, lipofection, transfection or electroporation. A wide variety of vectors may be used, such as retroviral vectors, lentiviral vectors, adenoviral vectors, adeno-associated viral vectors, plasmids or transposons, such as a Sleeping Beauty transposon (see U.S. Pat. Nos. 6,489,458; 7,148,203; 7,160,682; 7,985,739; 8,227,432), may be used to introduce CARs, for example using 2nd generation antigen-specific CARs signaling through CD3ζ and either CD28 or CD137. Viral vectors may for example include vectors based on HIV, SV40, EBV, HSV or BPV.

[1166] Cells that are targeted for transformation may for example include T cells, Natural Killer (NK) cells, cytotoxic T lymphocytes (CTL), regulatory T cells, human embryonic stem cells, tumor-infiltrating lymphocytes (TIL) or a pluripotent stem cell from which lymphoid cells may be differentiated. T cells expressing a desired CAR may for example be selected through co-culture with γ-irradiated activating and propagating cells (AaPC), which co-express the cancer antigen and co-stimulatory molecules. The engineered CAR T-cells may be expanded, for example by co-culture on AaPC in presence of soluble factors, such as IL-2 and IL-21. This expansion may for example be carried out so as to provide memory CAR+ T cells (which may for example be assayed by non-enzymatic digital array and/or multi-panel flow cytometry). In this way, CAR T cells may be provided that have specific cytotoxic activity against antigen-bearing tumors (optionally in conjunction with production of desired chemokines such as interferon-γ). CAR T cells of this kind may for example be used in animal models, for example to threat tumor xenografts.

[1167] Approaches such as the foregoing may be adapted to provide methods of treating and/or increasing survival of a subject having a disease, such as a neoplasia, for example by administering an effective amount of an immunoresponsive cell comprising an antigen recognizing receptor that binds a selected antigen, wherein the binding activates the immunoreponsive cell, thereby treating or preventing the disease (such as a neoplasia, a pathogen infection, an autoimmune disorder, or an allogeneic transplant reaction). Dosing in CAR T cell therapies may for example involve administration of from 106 to 109 cells/kg, with or without a course of lymphodepletion, for example with cyclophosphamide.

[1168] In one embodiment, the treatment can be administrated into patients undergoing an immunosuppressive treatment. The cells or population of cells, may be made resistant to at least one immunosuppressive agent due to the inactivation of a gene encoding a receptor for such immunosuppressive agent. Not being bound by a theory, the immunosuppressive treatment should help the selection and expansion of the immunoresponsive or T cells according to the invention within the patient.

[1169] The administration of the cells or population of cells according to the present invention may be carried out in any convenient manner, including by aerosol inhalation, injection, ingestion, transfusion, implantation or transplantation. The cells or population of cells may be administered to a patient subcutaneously, intradermally, intratumorally, intranodally, intramedullary, intramuscularly, by intravenous or intralymphatic injection, or intraperitoneally. In one embodiment, the cell compositions of the present invention are preferably administered by intravenous injection.

[1170] The administration of the cells or population of cells can consist of the administration of 104-109 cells per kg body weight, preferably 105 to 106 cells/kg body weight including all integer values of cell numbers within those ranges. Dosing in CAR T cell therapies may for example involve administration of from 106 to 109 cells/kg, with or without a course of lymphodepletion, for example with cyclophosphamide. The cells or population of cells can be administrated in one or more doses. In another embodiment, the effective amount of cells are administrated as a single dose. In another embodiment, the effective amount of cells are administrated as more than one dose over a period time. Timing of administration is within the judgment of managing physician and depends on the clinical condition of the patient. The cells or population of cells may be obtained from any source, such as a blood bank or a donor. While individual needs vary, determination of optimal ranges of effective amounts of a given cell type for a particular disease or conditions are within the skill of one in the art. An effective amount means an amount which provides a therapeutic or prophylactic benefit. The dosage administrated will be dependent upon the age, health and weight of the recipient, kind of concurrent treatment, if any, frequency of treatment and the nature of the effect desired.

[1171] In another embodiment, the effective amount of cells or composition comprising those cells are administrated parenterally. The administration can be an intravenous administration. The administration can be directly done by injection within a tumor.

[1172] To guard against possible adverse reactions, engineered immunoresponsive cells may be equipped with a transgenic safety switch, in the form of a transgene that renders the cells vulnerable to exposure to a specific signal. For example, the herpes simplex viral thymidine kinase (TK) gene may be used in this way, for example by introduction into allogeneic T lymphocytes used as donor lymphocyte infusions following stem cell transplantation (Greco, et al., Improving the safety of cell therapy with the TK-suicide gene. Front. Pharmacol. 2015; 6: 95). In such cells, administration of a nucleoside prodrug such as ganciclovir or acyclovir causes cell death. Alternative safety switch constructs include inducible caspase 9, for example triggered by administration of a small-molecule dimerizer that brings together two nonfunctional icasp9 molecules to form the active enzyme. A wide variety of alternative approaches to implementing cellular proliferation controls have been described (see U.S. Patent Publication No. 20130071414; PCT Patent Publication WO2011146862; PCT Patent Publication WO2014011987; PCT Patent Publication WO2013040371; Zhou et al. BLOOD, 2014, 123/25:3895-3905; Di Stasi et al., The New England Journal of Medicine 2011; 365:1673-1683; Sadelain M, The New England Journal of Medicine 2011; 365:1735-173; Ramos et al., Stem Cells 28(6):1107-15 (2010)).

[1173] In a further refinement of adoptive therapies, genome editing with a AD-functionalized CRISPR-Cas system as described herein may be used to tailor immunoresponsive cells to alternative implementations, for example providing edited CAR T cells (see Poirot et al., 2015, Multiplex genome edited T-cell manufacturing platform for “off-the-shelf” adoptive T-cell immunotherapies, Cancer Res 75 (18): 3853). For example, immunoresponsive cells may be edited to delete expression of some or all of the class of HLA type II and/or type I molecules, or to knockout selected genes that may inhibit the desired immune response, such as the PD1 gene.

[1174] Cells may be edited using a AD-functionalized CRISPR system as described herein. AD-functionalized CRISPR systems may be delivered to an immune cell by any method described herein. In preferred embodiments, cells are edited ex vivo and transferred to a subject in need thereof. Immunoresponsive cells, CAR-T cells or any cells used for adoptive cell transfer may be edited. Editing may be performed to eliminate potential alloreactive T-cell receptors (TCR), disrupt the target of a chemotherapeutic agent, block an immune checkpoint, activate a T cell, and/or increase the differentiation and/or proliferation of functionally exhausted or dysfunctional CD8+ T-cells (see PCT Patent Publications: WO2013176915, WO2014059173, WO2014172606, WO2014184744, and WO2014191128). Editing may result in inactivation of a gene.

[1175] T cell receptors (TCR) are cell surface receptors that participate in the activation of T cells in response to the presentation of antigen. The TCR is generally made from two chains, a and p, which assemble to form a heterodimer and associates with the CD3-transducing subunits to form the T cell receptor complex present on the cell surface. Each α and β chain of the TCR consists of an immunoglobulin-like N-terminal variable (V) and constant (C) region, a hydrophobic transmembrane domain, and a short cytoplasmic region. As for immunoglobulin molecules, the variable region of the α and β chains are generated by V(D)J recombination, creating a large diversity of antigen specificities within the population of T cells. However, in contrast to immunoglobulins that recognize intact antigen, T cells are activated by processed peptide fragments in association with an MHC molecule, introducing an extra dimension to antigen recognition by T cells, known as MHC restriction. Recognition of MHC disparities between the donor and recipient through the T cell receptor leads to T cell proliferation and the potential development of graft versus host disease (GVHD). The inactivation of TCRα or TCRβ can result in the elimination of the TCR from the surface of T cells preventing recognition of alloantigen and thus GVHD. However, TCR disruption generally results in the elimination of the CD3 signaling component and alters the means of further T cell expansion.

[1176] Allogeneic cells are rapidly rejected by the host immune system. It has been demonstrated that, allogeneic leukocytes present in non-irradiated blood products will persist for no more than 5 to 6 days (Boni, Muranski et al. 2008 Blood 1; 112(12):4746-54). Thus, to prevent rejection of allogeneic cells, the host's immune system usually has to be suppressed to some extent. However, in the case of adoptive cell transfer the use of immunosuppressive drugs also have a detrimental effect on the introduced therapeutic T cells. Therefore, to effectively use an adoptive immunotherapy approach in these conditions, the introduced cells would need to be resistant to the immunosuppressive treatment. Thus, in a particular embodiment, the present invention further comprises a step of modifying T cells to make them resistant to an immunosuppressive agent, preferably by inactivating at least one gene encoding a target for an immunosuppressive agent. An immunosuppressive agent is an agent that suppresses immune function by one of several mechanisms of action. An immunosuppressive agent can be, but is not limited to a calcineurin inhibitor, a target of rapamycin, an interleukin-2 receptor α-chain blocker, an inhibitor of inosine monophosphate dehydrogenase, an inhibitor of dihydrofolic acid reductase, a corticosteroid or an immunosuppressive antimetabolite. The present invention allows conferring immunosuppressive resistance to T cells for immunotherapy by inactivating the target of the immunosuppressive agent in T cells. As non-limiting examples, targets for an immunosuppressive agent can be a receptor for an immunosuppressive agent such as: CD52, glucocorticoid receptor (GR), a FKBP family gene member and a cyclophilin family gene member.

[1177] Immune checkpoints are inhibitory pathways that slow down or stop immune reactions and prevent excessive tissue damage from uncontrolled activity of immune cells. In certain embodiments, the immune checkpoint targeted is the programmed death-1 (PD-1 or CD279) gene (PDCD1). In other embodiments, the immune checkpoint targeted is cytotoxic T-lymphocyte-associated antigen (CTLA-4). In additional embodiments, the immune checkpoint targeted is another member of the CD28 and CTLA4 Ig superfamily such as BTLA, LAG3, ICOS, PDL1 or KIR. In further additional embodiments, the immune checkpoint targeted is a member of the TNFR superfamily such as CD40, OX40, CD137, GITR, CD27 or TIM-3.

[1178] Additional immune checkpoints include Src homology 2 domain-containing protein tyrosine phosphatase 1 (SHP-1) (Watson H A, et al., SHP-1: the next checkpoint target for cancer immunotherapy? Biochem Soc Trans. 2016 Apr. 15; 44(2):356-62). SHP-1 is a widely expressed inhibitory protein tyrosine phosphatase (PTP). In T-cells, it is a negative regulator of antigen-dependent activation and proliferation. It is a cytosolic protein, and therefore not amenable to antibody-mediated therapies, but its role in activation and proliferation makes it an attractive target for genetic manipulation in adoptive transfer strategies, such as chimeric antigen receptor (CAR) T cells. Immune checkpoints may also include T cell immunoreceptor with Ig and ITIM domains (TIGIT/Vstm3/WUCAM/VSIG9) and VISTA (Le Mercier I, et al., (2015) Beyond CTLA-4 and PD-1, the generation Z of negative checkpoint regulators. Front. Immunol. 6:418).

[1179] WO2014172606 relates to the use of MT1 and/or MT1 inhibitors to increase proliferation and/or activity of exhausted CD8+ T-cells and to decrease CD8+ T-cell exhaustion (e.g., decrease functionally exhausted or unresponsive CD8+ immune cells). In certain embodiments, metallothioneins are targeted by gene editing in adoptively transferred T cells.

[1180] In certain embodiments, targets of gene editing may be at least one targeted locus involved in the expression of an immune checkpoint protein. Such targets may include, but are not limited to CTLA4, PPP2CA, PPP2CB, PTPN6, PTPN22, PDCD1, ICOS (CD278), PDL1, KIR, LAG3, HAVCR2, BTLA, CD160, TIGIT, CD96, CRTAM, LAIR1, SIGLEC7, SIGLEC9, CD244 (2B4), TNFRSF10B, TNFRSF10A, CASP8, CASP10, CASP3, CASP6, CASP7, FADD, FAS, TGFBRII, TGFRBRI, SMAD2, SMAD3, SMAD4, SMAD10, SKI, SKIL, TGIF1, IL10RA, IL10RB, HMOX2, IL6R, IL6ST, EIF2AK4, CSK, PAG1, SIT1, FOXP3, PRDM1, BATF, VISTA, GUCY1A2, GUCY1A3, GUCY1B2, GUCY1B3, MT1, MT2, CD40, OX40, CD137, GITR, CD27, SHP-1 or TIM-3. In preferred embodiments, the gene locus involved in the expression of PD-1 or CTLA-4 genes is targeted. In other preferred embodiments, combinations of genes are targeted, such as but not limited to PD-1 and TIGIT.

[1181] In other embodiments, at least two genes are edited. Pairs of genes may include, but are not limited to PD1 and TCRα, PD1 and TCRβ, CTLA-4 and TCRα, CTLA-4 and TCRβ, LAG3 and TCRα, LAG3 and TCRβ, Tim3 and TCRα, Tim3 and TCRβ, BTLA and TCRα, BTLA and TCRβ, BY55 and TCRα, BY55 and TCRβ, TIGIT and TCRα, TIGIT and TCRβ, B7H5 and TCRα, B7H5 and TCRβ, LAIR1 and TCRα, LAIR1 and TCRβ, SIGLEC10 and TCRα, SIGLEC10 and TCRβ, 2B4 and TCRα, 2B4 and TCRβ.

[1182] Whether prior to or after genetic modification of the T cells, the T cells can be activated and expanded generally using methods as described, for example, in U.S. Pat. Nos. 6,352,694; 6,534,055; 6,905,680; 5,858,358; 6,887,466; 6,905,681; 7,144,575; 7,232,566; 7,175,843; 5,883,223; 6,905,874; 6,797,514; 6,867,041; and 7,572,631. T cells can be expanded in vitro or in vivo.

[1183] The practice of the present invention employs techniques known in the field of immunology, biochemistry, chemistry, molecular biology, microbiology, cell biology, genomics and recombinant DNA, which are within the skill of the art. See MOLECULAR CLONING: A LABORATORY MANUAL, 2nd edition (1989) (Sambrook, Fritsch and Maniatis); MOLECULAR CLONING: A LABORATORY MANUAL, 4th edition (2012) (Green and Sambrook); CURRENT PROTOCOLS IN MOLECULAR BIOLOGY (1987) (F. M. Ausubel, et al. eds.); the series METHODS IN ENZYMOLOGY (Academic Press, Inc.); PCR 2: A PRACTICAL APPROACH (1995) (M. J. MacPherson, B. D. Hames and G. R. Taylor eds.); ANTIBODIES, A LABORATORY MANUAL (1988) (Harlow and Lane, eds.); ANTIBODIES A LABORATORY MANUAL, 2nd edition (2013) (E. A. Greenfield ed.); and ANIMAL CELL CULTURE (1987) (R. I. Freshney, ed.).

### Screens/Diagnostics/Treatments Using CRISPR Systems

### Cancer

[1184] The methods and compositions of the invention can be used to identify cell states, components, and mechanisms associated with drug-tolerance and persistence of disease cells. Terai et al. (Cancer Research, 19 Dec. 2017, doi: 10.1158/0008-5472.CAN-17-1904) reported a genome-wide CRISPR/Cas9 enhancer/suppressor screen in EGFR-dependent lung cancer PC9 cells treated with erlotinib+THZ1 (CDK7/12 inhibitor) combination therapy to identify multiple genes that enhanced erlotinib/THZ1 synergy, as well as components and pathways that suppress synergy. Wang et al. (Cell Rep. 2017 Feb. 7; 18(6):1543-1557. doi: 10.1016/j.celrep.2017.01.031; Krall et al., Elife. 2017 Feb. 1; 6. pii: e18970. doi: 10.7554/eLife.18970) reported the use of genome-wide CRISPR loss-of-function screens to identify mediator of resistance to MAPK inhibitors. Donovan et al. (PLoS One. 2017 Jan. 24; 12(1):e0170445. doi: 10.1371/journal.pone.0170445. eCollection 2017) used a CRISPR-mediated approach to mutagenesis to identify novel gain-of-function and drug resistant alleles of the MAPK signaling pathway genes. Wang et al. (Cell. 2017 Feb. 23; 168(5):890-903.e15. doi: 10.1016/j.cell.2017.01.013. Epub 2017 Feb. 2) used genome-wide CRISPR screens to identify gene networks and synthetic lethal interactions with oncogenic Ras. Chow et al. (Nat Neurosci. 2017 October; 20(10):1329-1341. doi: 10.1038/nn.4620. Epub 2017 Aug. 14) developed an adeno-associated virus-mediated, autochthonous genetic CRISPR screen in glioblastoma to identify functional suppressors in glioblastoma. Xue et al. (Nature. 2014 Oct. 16; 514(7522):380-4. doi: 10.1038/nature13589. Epub 2014 Aug. 6) employed CRISPR-mediated direct mutation of cancer genes in the mouse liver.

[1185] Chen et al. (J Clin Invest. 2017 Dec. 4. pii: 90793. doi: 10.1172/JCI90793. [Epub ahead of print]) used a CRISPR-based screen to identify MYCN-amplified neuroblastoma dependency on EZH2. Support testing of EZH2 inhibitors in patients with MYCN-amplified neuroblastoma.

[1186] Vijai et al. (Cancer Discov. 2016 November; 6(11):1267-1275. Epub 2016 Sep. 21) reported use of CRISPR to generate heterozygous mutations in the mammary epithelial cell line to assess risk for breast cancer.

[1187] Chakraborty et al. (Sci Transl Med. 2017 Jul. 12; 9(398). pii: eaal5272. doi: 10.1126/scitranslmed.aal5272) used a CRISPR-based screen to identify EZH1 as potential target to treat clear cell renal cell carcinoma Metabolic disease

[1188] The methods and compositions of the invention provide advantages over conventional gene therapy methods in the treatment of inherited metabolic diseases of the liver, including but not limited to familial hypercholesterolemia, hemophilia, ornithine transcarbamylase deficiency, hereditary tyrosinemia type 1, and alpha-1 antitrypsin deficiency. See, Bryson et al., Yale J. Biol. Med. 90(4):553-566, 19 Dec. 2017.

[1189] Bompada et al. (Int J Biochem Cell Biol. 2016 December; 81(Pt A):82-91. doi: 10.1016/j.biocel.2016.10.022. Epub 2016 Oct. 29) described the use of CRISPR to knockout histone acetyltransferase in pancreatic beta cells to demonstrate that histone acetylation serves as a key regulator of glucose-induced increase in TXNIP gene expression and thereby glucotoxicity-induced apoptosis.

### Muscle

[1190] Provenzano et al. (Mol Ther Nucleic Acids. 9:337-348. 15 Dec. 2017; doi: 10.1016/j.omtn.2017.10.006. Epub 2017 Oct. 14) reported CRISPR/Cas9-mediated deletion of CTG expansions and permanent reversion to a normal phenotype in myogenic cells from myotonic dystrophy 1 patients. The methods and compositions of the instant invention are similarly applicable to nucleotide repeat disorders, not limited to CTG expansions. Tabebordbar et al. (2016 Jan. 22; 351(6271):407-411. doi: 10.1126/science.aad5177. Epub 2015 Dec. 31) reports the use of CRISPR to edit the Dmd exon 23 locus to correct disruptive mutations in DMD. Tabebordbar shows that programmable CRISPR complexes can be delivered locally and systemically to terminally differentiated skeletal muscle fibers and cardiomyocytes, as well as muscle satellite cells, in neonatal and adult mice, where they mediate targeted gene modification, restore dystrophin expression and partially recover functional deficiencies of dystrophic muscle. See also Nelson et al., (Science. 2016 Jan. 22; 351(6271):403-7. doi: 10.1126/science.aad5143. Epub 2015 Dec. 31).

### Infectious Disease

[1191] Sidik et al. (Cell. 2016 Sep. 8; 166(6):1423-1435.e12. doi: 10.1016/j.cell.2016.08.019. Epub 2016 Sep. 2) and Patel et al. (Nature. 2017 Aug. 31; 548(7669):537-542. doi: 10.1038/nature23477. Epub 2017 Aug. 7) describe a CRISPR screen in Toxoplasma and expansion of antiparasitic interventions.

[1192] There are several reports of genome-wide CRISPR screens to identify components and processes underlying host-pathogen interactions. Examples include Blondel et al. (Cell Host Microbe. 2016 Aug. 10; 20(2):226-37. doi: 10.1016/j.chom.2016.06.010. Epub 2016 Jul. 21), Shapiro et al. (Nat Microbiol. 2018 January; 3(1):73-82. doi: 10.1038/s41564-017-0043-0. Epub 2017 Oct. 23) and Park et al. (Nat Genet. 2017 February; 49(2):193-203. doi: 10.1038/ng.3741. Epub 2016 Dec. 19).

[1193] Ma et al. (Cell Host Microbe. 2017 May 10; 21(5):580-591.e7. doi: 10.1016/j.chom.2017.04.005) employed genome-wide CRISPR loss-of-function screens to identify viral transformation-driven synthetic lethal targets for therapeutic intervention.

### Cardiovascular Diseases

[1194] CRISPR systems can be used as to tool to identify genes or genetic variant associated with vascular disease. This is useful for identifying potential treatment or preventative targets. Xu et al. (Atherosclerosis, 2017 Sep. 21 pii: S0021-9150(17)31265-0. doi: 10.1016/j.atherosclerosis.2017.08.031. [Epub ahead of print]) reports the use of CRISPR to knockout the ANGPTL3 gene to confirm the role of ANGPTL3 in regulating plasma level of LDL-C. Gupta et al., (Cell. 2017 Jul. 27; 170(3):522-533.e15. doi: 10.1016/j.cell.2017.06.049) reports the use of CRISPR to edit stem cell-derived enthothelial cells to identify genetic variant associated with vascular diseases. Beaudoin et al., (Arterioscler Thromb Vasc Biol. 2015 June; 35(6):1472-1479. doi: 10.1161/ATVBAHA.115.305534. Epub 2015 Apr. 2), reports the use of CRISPR genome editing to disrupt binding of the transcription factors MEF2 at the locus. This sets the stage for exploring how PHACTR functions in the vascular endothelium influence coronary artery disease. Pashos et al. (Cell Stem Cell. 2017 Apr. 6; 20(4):558-570.e10. doi: 10.1016/j.stem.2017.03.017.) reports on using CRISPR technology to target pluripotent stem cells and hepatocyte-like cells to identify functional variants and lipid-functional genes.

### Neurological Diseases

[1195] The invention provides methods and compositions for investigating and treating neurological diseases and disorders. Nakayama et al., (Am J Hum Genet. 2015 May 7; 96(5):709-19. doi: 10.1016/j.ajhg.2015.03.003. Epub 2015 Apr. 9) report use of CRISPR to study the role of PYCR2 in human CNS development and to identify potential target for microcephaly and hypomyelination. Swiech et al. (Nat Biotechnol. 2015 January; 33(1):102-6. doi: 10.1038/nbt.3055. Epub 2014 Oct. 19) report use of CRISPR to target single (Mecp2) as well as multiple genes (Dnmt1, Dnmt3a and Dnmt3b) in the adult mouse brain in vivo. Shin et al. (Hum Mol Genet. 2016 Oct. 15; 25(20):4566-4576. doi: 10.1093/hmg/ddw286) describes the use of CRISPR to inactivate Huntingon's disease mutation. Platt et al. (Cell Rep. 2017 Apr. 11; 19(2):335-350. doi: 10.1016/j.celrep.2017.03.052) report use of CRISPR knockin mice to identify Chd8's role in autism spectrum disorder. Seo et al. (J Neurosci. 2017 Oct. 11; 37(41):9917-9924. doi: 10.1523/JNEUROSCI.0621-17.2017. Epub 2017 Sep. 14) describe use of CRISPR to generate models of neurodegenerative disorders. Petersen et al. (Neuron. 2017 Dec. 6; 96(5):1003-1012.e7. doi: 10.1016/j.neuron.2017.10.008. Epub 2017 Nov. 2) demonstrate CRISPR knockout of activin A receptor type I in oligodendrocyte progenitor cells to identify potential targets for diseases with remyelination failure. The methods and compositions of the instant invention are similarly applicable.

### Other Applications of CRISPR Technology

[1196] Renneville et al (Blood. 2015 Oct. 15; 126(16):1930-9. doi: 10.1182/blood-2015-06-649087. Epub 2015 Aug. 28) report use of CRISPR to study the roles of EHMT1 and EMHT2 in fetal hemoglobin expression and to identify novel therapeutic target for SCD.

[1197] Tothova et al. (Cell Stem Cell. 2017 Oct. 5; 21(4):547-555.e8. doi: 10.1016/j.stem.2017.07.015) reported the use of CRISPR in hematopoietic stem and progenitor cells for generating models of human myeloid diseases.

[1198] Giani et al. (Cell Stem Cell. 2016 Jan. 7; 18(1):73-78. doi: 10.1016/j.stem.2015.09.015. Epub 2015 Oct. 22) report that inactivation of SH2B3 by CRISPR/Cas9 genome editing in human pluripotent stem cells allowed enhanced erythroid cell expansion with preserved differentiation.

[1199] Wakabayashi et al. (Proc Natl Acad Sci USA. 2016 Apr. 19; 113(16):4434-9. doi: 10.1073/pnas.1521754113. Epub 2016 Apr. 4) employed CRISPR to gain insight into GATA1 transcriptional activity and to investigate the pathogenicity of noncoding variants in human erythroid disorders.

[1200] Mandal et al. (Cell Stem Cell. 2014 Nov. 6; 15(5):643-52. doi: 10.1016/j.stem.2014.10.004. Epub 2014 Nov. 6) describe CRISPR/Cas9 targeting of two clinically relevant genes, B2M and CCR5, in primary human CD4+ T cells and CD34+ hematopoietic stem and progenitor cells (HSPCs)

[1201] Polfus et al. (Am J Hum Genet. 2016 Sep. 1; 99(3):785. doi: 10.1016/j.ajhg.2016.08.002. Epub 2016 Sep. 1) used CRISPR to edit hematopoietic cell lines and follow-up targeted knockdown experiments in primary human hematopoietic stem and progenitor cells and investigate the role of GFI1B variants in human hematopoiesis.

[1202] Najm et al. (Nat Biotechnol. 2017 Dec. 18. doi: 10.1038/nbt.4048. [Epub ahead of print]) reports the use of CRISPR complex having a pair SaCas9 and SpCas9 to achieve dual targeting to generate high-complexity pooled dual-knockout libraries to identify synthetic lethal and buffering gene pairs across multiple cell types, including MAPK pathway genes and apoptotic genes.

[1203] Manguso et al. (Nature. 2017 Jul. 27; 547(7664):413-418. doi: 10.1038/nature23270. Epub 2017 Jul. 19.) reports the use of CRISPR screens to identify and/or confirm new immunotherapy targets. See also Roland et al. (Proc Natl Acad Sci USA. 2017 Jun. 20; 114(25):6581-6586. doi: 10.1073/pnas.1701263114. Epub 2017 Jun. 12.); Erb et al. (Nature. 2017 Mar. 9; 543(7644):270-274. doi: 10.1038/nature21688. Epub 2017 Mar. 1.); Hong et al., (Nat Commun. 2016 Jun. 22; 7:11987. doi: 10.1038/ncomms11987); Fei et al., (Proc Natl Acad Sci USA. 2017 Jun. 27; 114(26):E5207-E5215. doi: 10.1073/pnas.1617467114. Epub 2017 Jun. 13.); Zhang et al., (Cancer Discov. 2017 Sep. 29. doi: 10.1158/2159-8290.CD-17-0532. [Epub ahead of print]).

[1204] Joung et al. (Nature. 2017 Aug. 17; 548(7667):343-346. doi: 10.1038/nature23451. Epub 2017 Aug. 9.) reports the use of genome-wide screens to analyze long non-coding RNAs (lncRNA); see also Zhu et al., (Nat Biotechnol. 2016 December; 34(12):1279-1286. doi: 10.1038/nbt.3715. Epub 2016 Oct. 31); Sanjana et al., (Science. 2016 Sep. 30; 353(6307):1545-1549).

[1205] Barrow et al. (Mol Cell. 2016 Oct. 6; 64(1):163-175. doi: 10.1016/j.molcel.2016.08.023. Epub 2016 Sep. 22.) reports the use of genome-wide CRISPR screens to search for therapeutic targets for mitochondrial diseases. See also Vafai et al., (PLoS One. 2016 Sep. 13; 11(9):e0162686. doi: 10.1371/journal.pone.0162686. eCollection 2016).

[1206] Guo et al. (Elife. 2017 Dec. 5; 6. pii: e29329. doi: 10.7554/eLife.29329) reports the use of CRISPR to target human chondrocytes to elucidate biological mechanisms for human growth.

[1207] Ramanan et al. (Sci Rep. 2015 Jun. 2; 5:10833. doi: 10.1038/srep10833) reports the use of CRISPR to target and cleave conserved regions in the HBV genome.

### Correction of Disease-Associated Mutations and Pathogenic SNPs

[1208] In one aspect, the invention described herein provides methods for modifying an adenosine residue at a target locus with the aim of remedying and/or preventing a diseased condition that is or is likely to be caused by a G-to-A or C-to-T point mutation or a pathogenic single nucleotide polymorphism (SNP).

### Diseases Affecting the Brain and Central Nervous System

[1209] Pathogenic G-to-A or C-to-T mutations/SNPs associated with various diseases affecting the brain and central nervous system are reported in the ClinVar database and disclosed in Table A, including but not limited to Alzheimer's Disease, Parkinson's Disease, Autism, Amyotrophyic lateral sclerosis (ALS), Schizophrenia, Adrenoleukodystrophy, Aicardi Goutieres syndrome, Fabry disease, Lesch-Nyhan syndrome, and Menkes Disease. Accordingly, an aspect of the invention relates to a method for correcting one or more pathogenic G-to-A or C-to-T mutations/SNPs associated with any of these diseases, as discussed below.

[1210] Nakayama et al., (Am J Hum Genet. 2015 May 7; 96(5):709-19. doi: 10.1016/j.ajhg.2015.03.003. Epub 2015 Apr. 9) report use of CRISPR to study the role of PYCR2 in human CNS development and to identify potential target for microcephaly and hypomyelination. Swiech et al. (Nat Biotechnol. 2015 January; 33(1):102-6. doi: 10.1038/nbt.3055. Epub 2014 Oct. 19) report use of CRISPR to target single (Mecp2) as well as multiple genes (Dnmt1, Dnmt3a and Dnmt3b) in the adult mouse brain in vivo. Shin et al. (Hum Mol Genet. 2016 Oct. 15; 25(20):4566-4576. doi: 10.1093/hmg/ddw286) describes the use of CRISPR to inactivate Huntingon's disease mutation.

### Alzheimer's Disease

[1211] In some embodiments, the methods, systems, and compositions described herein are used to correct one or more pathogenic G-to-A or C-to-T mutations/SNPs associated with Alzheimer's Disease. In some embodiments, the pathogenic mutations/SNPs are present in at least one gene selected from PSEN1, PSEN2, and APP, including at least the followings:

### NM_000021.3(PSEN1):c.796G>A (p.Gly266Ser)

### NM_000484.3(APP):c.2017G>A (p.Ala673Thr)

### NM_000484.3(APP):c.2149G>A (p.Val717Ile)

### NM_000484.3(APP):c.2137G>A (p.Ala713Thr)

### NM_000484.3(APP):c.2143G>A (p.Val715Met)

[1212] NM_000484.3(APP):c.2141C>T (p. Thr714Ile)

### NM_000021.3(PSEN1):c.438G>A (p.Metl46Ile)

### NM_000021.3(PSEN1):c.1229G>A (p.Cys410Tyr)

### NM_000021.3(PSEN1):c.487C>T (p.His163Tyr)

### NM_000021.3(PSEN1):c.799C>T (p.Pro267Ser)

### NM_000021.3(PSEN1):c.236C>T (p.Ala79Val)

### NM_000021.3(PSEN1):c.509C>T (p.Ser170Phe)

### NM_000447.2(PSEN2):c.1289C>T (p.Thr430Met)

### NM_000447.2(PSEN2):c.717G>A (p.Met239Ile)

### NM_000447.2(PSEN2):c.254C>T (p.Ala85Val)

### NM_000021.3(PSEN1):c.806G>A (p.Arg269His)

### NM_000484.3(APP):c.2018C>T (p.Ala673Val).

[1213] See Table A. Accordingly, an aspect of the invention relates to a method for treating or preventing Alzheimer's Disease by correcting one or more pathogenic G-to-A or C-to-T mutations/SNPs, particularly one or more pathogenic G-to-A or C-to-T mutations/SNPs present in at least one gene selected from PSEN1, PSEN2, and APP, and more particularly one or more pathogenic G-to-A or C-to-T mutations/SNPs described above.

### Parkinson's Disease

[1214] In some embodiments, the methods, systems, and compositions described herein are used to correct one or more pathogenic G-to-A or C-to-T mutations/SNPs associated with Parkinson's Disease. In some embodiments, In some embodiment, the pathogenic mutations/SNPs are present in at least one gene selected from SNCA, PLA2G6, FBXO7, VPS35, EIF4G1, DNAJC6, PRKN, SYNJ1, CHCHD2, PINK1, PARK7, LRRK2, ATP13A2, and GBA, including at least the followings:

### NM_000345.3(SNCA):c.157G>A (p.Ala53Thr)

### NM_000345.3(SNCA):c.152G>A (p.Gly51Asp)

### NM_003560.3(PLA2G6):c.2222G>A (p.Arg741Gln)

### NM_003560.3(PLA2G6):c.2239C>T (p.Arg747Trp)

### NM_003560.3(PLA2G6):c.1904G>A (p.Arg635Gln)

### NM_003560.3(PLA2G6):c.1354C>T (p.Gln452Ter)

### NM_012179.3(FBXO7):c.1492C>T (p.Arg498Ter)

### NM_012179.3(FBXO7):c.65C>T (p.Thr22Met)

### NM_018206.5(VPS35):c.1858G>A (p.Asp620Asn)

### NM_198241.2(EIF4G1):c.3614G>A (p.Arg1205His)

### NM_198241.2(EIF4G1):c.1505C>T (p.Ala502Val)

### NM_001256865.1(DNAJC6):c.2200C>T (p.Gln734Ter)

### NM_001256865.1(DNAJC6):c.2326C>T (p.Gln776Ter)

### NM_004562.2(PRKN):c.931C>T (p.Gln311Ter)

### NM_004562.2(PRKN):c.1358G>A (p.Trp453Ter)

### NM_004562.2(PRKN):c.635G>A (p.Cys212Tyr)

### NM_203446.2(SYNJ1):c.773G>A (p.Arg258Gln)

### NM_001320327.1(CHCHD2):c.182C>T (p.Thr61Ile)

### NM_001320327.1(CHCHD2):c.434G>A (p.Arg145Gln)

### NM_001320327.1(CHCHD2):c.300+5G>A

### NM_032409.2(PINK1):c.926G>A (p.Gly309Asp)

### NM_032409.2(PINK1):c.1311G>A (p.Trp437Ter)

### NM_032409.2(PINK1):c.736C>T (p.Arg246Ter)

### NM_032409.2(PINK1):c.836G>A (p.Arg279His)

### NM_032409.2(PINK1):c.938C>T (p.Thr313Met)

### NM_032409.2(PINK1):c.1366C>T (p.Gln456Ter)

### NM_007262.4(PARK7):c.78G>A (p.Met26Ile)

### NM_198578.3(LRRK2):c.4321C>T (p.Arg1441Cys)

### NM_198578.3(LRRK2):c.4322G>A (p.Arg1441His)

### NM_198578.3(LRRK2):c.1256C>T (p.Ala419Val)

### NM_198578.3(LRRK2):c.6055G>A (p.Gly2019Ser)

### NM_022089.3(ATP13A2):c.1306+5G>A

### NM_022089.3(ATP13A2):c.2629G>A (p.Gly877Arg)

### NM_022089.3(ATP13A2):c.490C>T (p.Arg164Trp)

### NM_001005741.2(GBA):c.1444G>A (p.Asp482Asn)

### m.15950G>A.

[1215] See Table A. Accordingly, an aspect of the invention relates to a method for treating or preventing Parkinson's Disease by correcting one or more pathogenic G-to-A or C-to-T mutations/SNPs, particularly one or more pathogenic G-to-A or C-to-T mutations/SNPs in at least one gene selected from SNCA, PLA2G6, FBXO7, VPS35, EIF4G1, DNAJC6, PRKN, SYNJ1, CHCHD2, PINK1, PARK7, LRRK2, ATP13A2, and GBA, and more particularly one or more pathogenic G-to-A or C-to-T mutations/SNPs described above.

### Autism

[1216] In some embodiments, the methods, systems, and compositions described herein are used to correct one or more pathogenic G-to-A or C-to-T mutations/SNPs associated with Autism. In some embodiments, the pathogenic mutations/SNPs are present in at least one gene selected from MECP2, NLGN3, SLC9A9, EHMT1, CHD8, NLGN4X, GSPT2, and PTEN, including at least the followings:

### NM_001110792.1(MECP2):c.916C>T (p.Arg306Ter)

### NM_004992.3(MECP2):c.473C>T (p.Thr158Met)

### NM_018977.3(NLGN3):c.1351C>T (p.Arg451Cys)

### NM_173653.3(SLC9A9):c.1267C>T (p.Arg423Ter)

### NM_024757.4(EHMT1):c.3413G>A (p.Trp1138Ter)

### NM_020920.3(CHD8):c.2875C>T (p.Gln959Ter)

### NM_020920.3(CHD8):c.3172C>T (p.Arg1058Ter)

### NM_181332.2(NLGN4X):c.301C>T (p.Arg101Ter)

### NM_018094.4(GSPT2):c.1021G>A (p.Val341Ile)

### NM_000314.6(PTEN):c.392C>T (p.Thr131Ile)

[1217] See Table A. Accordingly, an aspect of the invention relates to a method for treating or preventing Autism by correcting one or more pathogenic G-to-A or C-to-T mutations/SNPs, particularly one or more pathogenic G-to-A or C-to-T mutations/SNPs present in at least one gene selected from MECP2, NLGN3, SLC9A9, EHMT1, CHD8, NLGN4X, GSPT2, and PTEN, and more particularly one or more pathogenic G-to-A or C-to-T mutations/SNPs described above.

### Amyotrophyic Lateral Sclerosis (ALS)

[1218] In some embodiments, the methods, systems, and compositions described herein are used to correct one or more pathogenic G-to-A or C-to-T mutations/SNPs associated with ALS. In some embodiments, the pathogenic mutations/SNPs are present in at least one gene selected from SOD1, VCP, UBQLN2, ERBB4, HNRNPA1, TUBA4A, SOD1, TARDBP, FIG. 4, OPTN, SETX, SPG11, FUS, VAPB, ANG, CHCHID10, SQSTM1, and TBK1, including at least the followings:

### NM_000454.4(SOD1):c.289G>A (p.Asp97Asn)

### NM_007126.3(VCP):c.1774G>A (p.Asp592Asn)

### NM_007126.3(VCP):c.464G>A (p.Arg155His)

### NM_007126.3(VCP):c.572G>A (p.Arg191Gln)

### NM_013444.3(UBQLN2):c.1489C>T (p.Pro497Ser)

### NM_013444.3(UBQLN2):c.1525C>T (p.Pro509Ser)

### NM_013444.3(UBQLN2):c.1573C>T (p.Pro525Ser)

### NM_013444.3(UBQLN2):c.1490C>T (p.Pro497Leu)

### NM_005235.2(ERBB4):c.2780G>A (p.Arg927Gln)

### NM_005235.2(ERBB4):c.3823C>T (p.Arg1275Trp)

### NM_031157.3(HNRNPA1):c.940G>A (p.Asp314Asn)

### NM_006000.2(TUBA4A):c.643C>T (p.Arg215Cys)

### NM_006000.2(TUBA4A):c.958C>T (p.Arg320Cys)

### NM_006000.2(TUBA4A):c.959G>A (p.Arg320His)

### NM_006000.2(TUBA4A):c.1220G>A (p.Trp407Ter)

### NM_006000.2(TUBA4A):c.1147G>A (p.Ala383Thr)

### NM_000454.4(SOD1):c.112G>A (p.Gly38Arg)

### NM_000454.4(SOD1):c.124G>A (p.Gly42Ser)

### NM_000454.4(SOD1):c.125G>A (p.Gly42Asp)

### NM_000454.4(SOD1):c.14C>T (p.Ala5Val)

### NM_000454.4(SOD1):c.13G>A (p.Ala5Thr)

### NM_000454.4(SOD1):c.436G>A (p.Ala146Thr)

### NM_000454.4(SOD1):c.64G>A (p.Glu22Lys)

### NM_000454.4(SOD1):c.404G>A (p.Ser135Asn)

### NM_000454.4(SOD1):c.49G>A (p.Gly17Ser)

### NM_000454.4(SOD1):c.217G>A (p.Gly73Ser)

### NM_007375.3(TARDBP):c.892G>A (p.Gly298Ser)

### NM_007375.3(TARDBP):c.943G>A (p.Ala315Thr)

### NM_007375.3(TARDBP):c.883G>A (p.Gly295Ser)

### NM_007375.3(TARDBP):c.*697G>A

### NM_007375.3(TARDBP):c.1144G>A (p.Ala382Thr)

### NM_007375.3(TARDBP):c.859G>A (p.Gly287Ser)

### NM_014845.5(FIG. 4):c.547C>T (p.Arg183Ter)

### NM_001008211.1(OPTN):c.1192C>T (p.Gln398Ter)

### NM_015046.5(SETX):c.6407G>A (p.Arg2136His)

### NM_015046.5(SETX):c.8C>T (p.Thr3Ile)

### NM_025137.3(SPG11):c.118C>T (p.Gln40Ter)

### NM_025137.3(SPG11):c.267G>A (p.Trp89Ter)

### NM_025137.3(SPG11):c.5974C>T (p.Arg1992Ter)

### NM_004960.3(FUS):c.1553G>A (p.Arg518Lys)

### NM_004960.3(FUS):c.1561C>T (p.Arg521Cys)

### NM_004960.3(FUS):c.1562G>A (p.Arg521His)

### NM_004960.3(FUS):c.1520G>A (p.Gly507Asp)

### NM_004960.3(FUS):c.1483C>T (p.Arg495Ter)

### NM_004960.3(FUS):c.616G>A (p.Gly206Ser)

### NM_004960.3(FUS):c.646C>T (p.Arg216Cys)

### NM_004738.4(VAPB):c.166C>T (p.Pro56Ser)

### NM_004738.4(VAPB):c.137C>T (p.Thr46Ile)

### NM_001145.4(ANG):c.164G>A (p.Arg55Lys)

### NM_001145.4(ANG):c.155G>A (p.Ser52Asn)

### NM_001145.4(ANG):c.407C>T (p.Pro136Leu)

### NM_001145.4(ANG):c.409G>A (p.Val137Ile)

### NM_001301339.1(CHCHD10):c.239C>T (p.Pro80Leu)

### NM_001301339.1(CHCHD10):c.176C>T (p.Ser59Leu)

### NM_001142298.1(SQSTM1):c.−47-1924C>T

### NM_003900.4(SQSTM1):c.1160C>T (p.Pro387Leu)

### NM_003900.4(SQSTM1):c.1175C>T (p.Pro392Leu)

### NM_013254.3(TBK1):c.1340+1G>A

### NM_013254.3(TBK1):c.2086G>A (p.Glu696Lys)

[1219] See Table A. Accordingly, an aspect of the invention relates to a method for treating or preventing ALS by correcting one or more pathogenic G-to-A or C-to-T mutations/SNPs, particularly one or more pathogenic G-to-A or C-to-T mutations/SNPs present in at least one gene selected from SOD1, VCP, UBQLN2, ERBB4, HNRNPA1, TUBA4A, SOD1, TARDBP, FIG. 4, OPTN, SETX, SPG11, FUS, VAPB, ANG, CHCHD10, SQSTM1, and TBK1, and more particularly one or more pathogenic G-to-A or C-to-T mutations/SNPs described above.

### Schizophrenia

[1220] In some embodiments, the methods, systems, and compositions described herein are used to correct one or more pathogenic G-to-A or C-to-T mutations/SNPs associated with Schizophrenia. In some embodiment, the pathogenic mutations/SNPs are present in at least one gene selected from PRODH, SETD1A, and SHANK3, including at least the followings:

### NM_016335.4(PRODH):c.1292G>A (p.Arg431His)

### NM_016335.4(PRODH):c.1397C>T (p.Thr466Met)

### NM_014712.2(SETD1A):c.2209C>T (p.Gln737Ter)

### NM_033517.1(SHANK3):c.3349C>T (p.Arg1117Ter)

### NM_033517.1(SHANK3):c.1606C>T (p.Arg536Trp)

[1221] See Table A. Accordingly, an aspect of the invention relates to a method for treating or preventing Schizophrenia by correcting one or more pathogenic G-to-A or C-to-T mutations/SNPs, particularly one or more pathogenic G-to-A or C-to-T mutations/SNPs present in at least one gene selected from PRODH, SETD1A, and SHANK3, and more particularly one or more pathogenic G-to-A or C-to-T mutations/SNPs described above.

### Adrenoleukodystrophy

[1222] In some embodiments, the methods, systems, and compositions described herein are used to correct one or more pathogenic G-to-A or C-to-T mutations/SNPs associated with Adrenoleukodystrophy. In some embodiment, the pathogenic mutations/SNPs are present in at least the ABCD1 gene, including at least the followings:

### NM_000033.3(ABCD1):c.421G>A (p.Ala141Thr)

### NM_000033.3(ABCD1):c.796G>A (p.Gly266Arg)

### NM_000033.3(ABCD1):c.1252C>T (p.Arg418Trp)

### NM_000033.3(ABCD1):c.1552C>T (p.Arg518Trp)

### NM_000033.3(ABCD1):c.1850G>A (p.Arg617His)

### NM_000033.3(ABCD1):c.1396C>T (p.Gln466Ter)

### NM_000033.3(ABCD1):c.1553G>A (p.Arg518Gln)

### NM_000033.3(ABCD1):c.1679C>T (p.Pro560Leu)

### NM_000033.3(ABCD1):c.1771C>T (p.Arg591Trp)

### NM_000033.3(ABCD1):c.1802G>A (p.Trp601Ter)

### NM_000033.3(ABCD1):c.346G>A (p.Gly116Arg)

### NM_000033.3(ABCD1):c.406C>T (p.Gln136Ter)

### NM_000033.3(ABCD1):c.1661G>A (p.Arg554His)

### NM_000033.3(ABCD1):c.1825G>A (p.Glu609Lys)

### NM_000033.3(ABCD1):c.1288C>T (p.Gln430Ter)

### NM_000033.3(ABCD1):c.1781−1G>A

### NM_000033.3(ABCD1):c.529C>T (p.Gln177Ter)

### NM_000033.3(ABCD1):c.1866-10G>A

[1223] See Table A. Accordingly, an aspect of the invention relates to a method for treating or preventing Adrenoleukodystrophy by correcting one or more pathogenic G-to-A or C-to-T mutations/SNPs, particularly one or more pathogenic G-to-A or C-to-T mutations/SNPs present in at least the ABCD1 gene, and more particularly one or more pathogenic G-to-A or C-to-T mutations/SNPs described above.

### Aicardi Goutieres Syndrome

[1224] In some embodiments, the methods, systems, and compositions described herein are used to correct one or more pathogenic G-to-A or C-to-T mutations/SNPs associated with Aicardi Goutieres syndrome. In some embodiment, the pathogenic mutations/SNPs are present in at least one gene selected from TREX1, RNASEH2C, ADAR, and IFIH1, including at least the followings:

### NM_016381.5(TREX1):c.794G>A (p.Trp265Ter)

### NM_033629.4(TREX1):c.52G>A (p.Asp18Asn)

### NM_033629.4(TREX1):c.490C>T (p.Arg164Ter)

### NM_032193.3(RNASEH2C):c.205C>T (p.Arg69Trp)

### NM_001111.4(ADAR):c.3019G>A (p.Gly1007Arg)

### NM_022168.3(IFIH1):c.2336G>A (p.Arg779His)

### NM_022168.3(IFIH1):c.2335C>T (p.Arg779Cys)

[1225] See Table A. Accordingly, an aspect of the invention relates to a method for treating or preventing Aicardi Goutieres syndrome by correcting one or more pathogenic G-to-A or C-to-T mutations/SNPs, particularly one or more pathogenic G-to-A or C-to-T mutations/SNPs present in at least one gene selected from TREX1, RNASEH2C, ADAR, and IFIH1, and more particularly one or more pathogenic G-to-A or C-to-T mutations/SNPs described above.

### Fabry Disease

[1226] In some embodiments, the methods, systems, and compositions described herein are used to correct one or more pathogenic G-to-A or C-to-T mutations/SNPs associated with Fabry disease. In some embodiment, the pathogenic mutations/SNPs are present in at least the GLA gene, including at least the followings:

### NM_000169.2(GLA):c.1024C>T (p.Arg342Ter)

### NM_000169.2(GLA):c.1066C>T (p.Arg356Trp)

### NM_000169.2(GLA):c.1025G>A (p.Arg342Gln)

### NM_000169.2(GLA):c.281G>A (p.Cys94Tyr)

### NM_000169.2(GLA):c.677G>A (p.Trp226Ter)

### NM_000169.2(GLA):c.734G>A (p.Trp245Ter)

### NM_000169.2(GLA):c.748C>T (p.Gln250Ter)

### NM_000169.2(GLA):c.658C>T (p.Arg220Ter)

### NM_000169.2(GLA):c.730G>A (p.Asp244Asn)

### NM_000169.2(GLA):c.369+1G>A

### NM_000169.2(GLA):c.335G>A (p.Arg112His)

### NM_000169.2(GLA):c.485G>A (p.Trp162Ter)

### NM_000169.2(GLA):c.661C>T (p.Gln221Ter)

### NM_000169.2(GLA):c.916C>T (p.Gln306Ter)

### NM_000169.2(GLA):c.1072G>A (p.Glu358Lys)

### NM_000169.2(GLA):c.1087C>T (p.Arg363Cys)

### NM_000169.2(GLA):c.1088G>A (p.Arg363His)

### NM_000169.2(GLA):c.605G>A (p.Cys202Tyr)

### NM_000169.2(GLA):c.830G>A (p.Trp277Ter)

### NM_000169.2(GLA):c.979C>T (p.Gn327Ter)

### NM_000169.2(GLA):c.422C>T (p.Thr141Ile)

### NM_000169.2(GLA):c.285G>A (p.Trp95Ter)

### NM_000169.2(GLA):c.735G>A (p.Trp245Ter)

### NM_000169.2(GLA):c.639+919G>A

### NM_000169.2(GLA):c.680G>A (p.Arg227Gln)

### NM_000169.2(GLA):c.679C>T (p.Arg227Ter)

### NM_000169.2(GLA):c.242G>A (p.Trp81Ter)

### NM_000169.2(GLA):c.901C>T (p.Arg301Ter)

### NM_000169.2(GLA):c.974G>A (p.Gly325Asp)

### NM_000169.2(GLA):c.847C>T (p.Gln283Ter)

### NM_000169.2(GLA):c.469C>T (p.Gln157Ter)

### NM_000169.2(GLA):c.1118G>A (p.Gly373Asp)

[1227] See Table A. Accordingly, an aspect of the invention relates to a method for treating or preventing Fabry disease by correcting one or more pathogenic G-to-A or C-to-T mutations/SNPs, particularly one or more pathogenic G-to-A or C-to-T mutations/SNPs present in at least the GLA gene, and more particularly one or more pathogenic G-to-A or C-to-T mutations/SNPs described above.

### Lesch-Nyhan Syndrome

[1228] In some embodiments, the methods, systems, and compositions described herein are used to correct one or more pathogenic G-to-A or C-to-T mutations/SNPs associated with Lesch-Nyhan syndrome. In some embodiment, the pathogenic mutations/SNPs are present in at least the HPRT1 gene, including at least the followings:

### NM_000194.2(HPRT1):c.151C>T (p.Arg51Ter)

### NM_000194.2(HPRT1):c.384+1G>A

[1229] See Table A. Accordingly, an aspect of the invention relates to a method for treating or preventing Lesch-Nyhan syndrome by correcting one or more pathogenic G-to-A or C-to-T mutations/SNPs, particularly one or more pathogenic G-to-A or C-to-T mutations/SNPs present in at least the HPRT1 gene, and more particularly one or more pathogenic G-to-A or C-to-T mutations/SNPs described above.

### Menkes Disease

[1230] In some embodiments, the methods, systems, and compositions described herein are used to correct one or more pathogenic G-to-A or C-to-T mutations/SNPs associated with Menkes Disease. In some embodiment, the pathogenic mutations/SNPs are present in at least the ATP7A gene, including at least the followings:

### NM_000052.6(ATP7A):c.601C>T (p.Arg201Ter)

### NM_000052.6(ATP7A):c.2938C>T (p.Arg980Ter)

### NM_000052.6(ATP7A):c.3056G>A (p.Gly1019Asp)

### NM_000052.6(ATP7A):c.598C>T (p.Gln200Ter)

### NM_000052.6(ATP7A):c.1225C>T (p.Arg409Ter)

### NM_000052.6(ATP7A):c.1544−1G>A

### NM_000052.6(ATP7A):c.1639C>T (p.Arg547Ter)

### NM_000052.6(ATP7A):c.1933C>T (p.Arg645Ter)

### NM_000052.6(ATP7A):c.1946+5G>A

### NM_000052.6(ATP7A):c.1950G>A (p.Trp650Ter)

### NM_000052.6(ATP7A):c.2179G>A (p.Gly727Arg)

### NM_000052.6(ATP7A):c.2187G>A (p.Trp729Ter)

### NM_000052.6(ATP7A):c.2383C>T (p.Arg795Ter)

### NM_000052.6(ATP7A):c.2499−1G>A

### NM_000052.6(ATP7A):c.2555C>T (p.Pro852Leu)

### NM_000052.6(ATP7A):c.2956C>T (p.Arg986Ter)

### NM_000052.6(ATP7A):c.3112−1G>A

### NM_000052.6(ATP7A):c.3466C>T (p.Gln1156Ter)

### NM_000052.6(ATP7A):c.3502C>T (p.Gln1168Ter)

### NM_000052.6(ATP7A):c.3764G>A (p.Gly1255Glu)

### NM_000052.6(ATP7A):c.3943G>A (p.Gly1315Arg)

### NM_000052.6(ATP7A):c.4123+1G>A

### NM_000052.6(ATP7A):c.4226+5G>A

[1231] See Table A. Accordingly, an aspect of the invention relates to a method for treating or preventing Menkes Disease by correcting one or more pathogenic G-to-A or C-to-T mutations/SNPs, particularly one or more pathogenic G-to-A or C-to-T mutations/SNPs present in at least the ATP7A gene, and more particularly one or more pathogenic G-to-A or C-to-T mutations/SNPs described above.

### Eye Diseases

[1232] The invention provides efficient treatment of inherited and acquired ocular diseases of the retina. Holmgaard et al. (Mol. Ther. Nucleic Acids 9:89-99, 15 Dec. 2017 doi: 10.1016/j.omtn.2017.08.016. Epub 2017 Sep. 21) reported indel formation at high frequencies when SpCas9 was delivered by lentiviral vectors (LVs) encoding SpCas9 targeted to Vegfa and there was a significant reduction of of VEGFA in transduced cells. Duan et al. (J Biol Chem. 2016 Jul. 29; 291(31):16339-47. doi: 10.1074/jbc.M116.729467. Epub 2016 May 31) describe use of CRISPR to target MDM2 genomic locus in human primary retinal pigment epithelial cells

[1233] The methods and compositions of the instant invention are similarly applicable to treatment of ocular diseases, including age-related macular degeneration.

[1234] Huang et al. (Nat Commun. 2017 Jul. 24; 8(1):112. doi: 10.1038/s41467-017-00140-3 employed CRISPR to edit VEGFR2 to treat angiogenesis-associated diseases.

[1235] Pathogenic G-to-A or C-to-T mutations/SNPs associated with various eye diseases are reported in the ClinVar database and disclosed in Table A, including but not limited to Stargardt Disease, Bardet-Biedl Syndrome, Cone-rod dystrophy, Congenital Stationary Night Blindness, Usher Syndrome, Leber Congenital Amaurosis, Retinitis Pigmentosa, and Achromatopsia. Accordingly, an aspect of the invention relates to a method for correcting one or more pathogenic G-to-A or C-to-T mutations/SNPs associated with any of these diseases, as discussed below.

### Stargardt Disease

[1236] In some embodiments, the methods, systems, and compositions described herein are used to correct one or more pathogenic G-to-A or C-to-T mutations/SNPs associated with Stargardt Disease. In some embodiment, the pathogenic mutations/SNPs are present in the ABCA4 gene, including at least the followings:

### NM_000350.2(ABCA4):c.4429C>T (p.Gln1477Ter)

### NM_000350.2(ABCA4):c.6647C>T (p.Ala2216Val)

### NM_000350.2(ABCA4):c.5312+1G>A

### NM_000350.2(ABCA4):c.5189G>A (p.Trp1730Ter)

### NM_000350.2(ABCA4):c.4352+1G>A

### NM_000350.2(ABCA4):c.4253+5G>A

### NM_000350.2(ABCA4):c.3871C>T (p.Gln1291Ter)

### NM_000350.2(ABCA4):c.3813G>A (p.Glu1271=)

### NM_000350.2(ABCA4):c.1293G>A (p.Trp431Ter)

### NM_000350.2(ABCA4):c.206G>A (p.Trp69Ter)

### NM_000350.2(ABCA4):c.3322C>T (p.Arg1108Cys)

### NM_000350.2(ABCA4):c.1804C>T (p.Arg602Trp)

### NM_000350.2(ABCA4):c.1937+1G>A

### NM_000350.2(ABCA4):c.2564G>A (p.Trp855Ter)

### NM_000350.2(ABCA4):c.4234C>T (p.Gln1412Ter)

### NM_000350.2(ABCA4):c.4457C>T (p.Pro1486Leu)

### NM_000350.2(ABCA4):c.4594G>A (p.Asp1532Asn)

### NM_000350.2(ABCA4):c.4919G>A (p.Arg1640Gln)

### NM_000350.2(ABCA4):c.5196+1G>A

### NM_000350.2(ABCA4):c.6316C>T (p.Arg2106Cys)

### NM_000350.2(ABCA4):c.3056C>T (p.Thr1019Met)

### NM_000350.2(ABCA4):c.52C>T (p.Arg18Trp)

### NM_000350.2(ABCA4):c.122G>A (p.Trp41Ter)

### NM_000350.2(ABCA4):c.1903C>T (p.Gln635Ter)

### NM_000350.2(ABCA4):c.194G>A (p.Gly65Glu)

### NM_000350.2(ABCA4):c.3085C>T (p.Gln1029Ter)

### NM_000350.2(ABCA4):c.4195G>A (p.Glu1399Lys)

### NM_000350.2(ABCA4):c.454C>T (p.Arg152Ter)

### NM_000350.2(ABCA4):c.45G>A (p.Trp15Ter)

### NM_000350.2(ABCA4):c.4610C>T (p.Thr1537Met)

### NM_000350.2(ABCA4):c.6112C>T (p.Arg2038Trp)

### NM_000350.2(ABCA4):c.6118C>T (p.Arg2040Ter)

### NM_000350.2(ABCA4):c.6342G>A (p.Val2114=)

### NM_000350.2(ABCA4):c.6658C>T (p.Gln2220Ter)

[1237] See Table A. Accordingly, an aspect of the invention relates to a method for treating or preventing Stargardt Disease by correcting one or more pathogenic G-to-A or C-to-T mutations/SNPs, particularly one or more pathogenic G-to-A or C-to-T mutations/SNPs present in the ABCA4 gene, and more particularly one or more pathogenic G-to-A or C-to-T mutations/SNPs described above.

### Bardet-Biedl Syndrome

[1238] In some embodiments, the methods, systems, and compositions described herein are used to correct one or more pathogenic G-to-A or C-to-T mutations/SNPs associated with Bardet-Biedl Syndrome. In some embodiment, the pathogenic mutations/SNPs are present in at least one gene selected from BBS1, BBS2, BBS7, BBS9, BBS10, BBS12, LZTFL1, and TRIM32, including at least the followings:

### NM_024649.4(BBS1):c.416G>A (p.Trp139Ter)

### NM_024649.4(BBS1):c.871C>T (p.Gln291Ter)

### NM_198428.2(BBS9):c.263+1G>A

### NM_001178007.1(BBS12):c.1704G>A (p.Trp568Ter)

### NM_001276378.1(LZTFL1):c.271C>T (p.Arg91Ter)

### NM_031885.3(BBS2):c.1864C>T (p.Arg622Ter)

### NM_198428.2(BBS9):c.1759C>T (p.Arg587Ter)

### NM_198428.2(BBS9):c.1789+1G>A

### NM_024649.4(BBS1):c.432+1G>A

### NM_176824.2(BBS7):c.632C>T (p.Thr211Ile)

### NM_012210.3(TRIM32):c.388C>T (p.Pro130Ser)

### NM_031885.3(BBS2):c.823C>T (p.Arg275Ter)

### NM_024685.3(BBS10):c.145C>T (p.Arg49Trp)

[1239] See Table A. Accordingly, an aspect of the invention relates to a method for treating or preventing Bardet-Biedl Syndrome by correcting one or more pathogenic G-to-A or C-to-T mutations/SNPs, particularly one or more pathogenic G-to-A or C-to-T mutations/SNPs present in at least one gene selected from BBS1, BBS2, BBS7, BBS9, BBS10, BBS12, LZTFL1, and TRIM32, and more particularly one or more pathogenic G-to-A or C-to-T mutations/SNPs described above.

### Cone-Rod Dystrophy

[1240] In some embodiments, the methods, systems, and compositions described herein are used to correct one or more pathogenic G-to-A or C-to-T mutations/SNPs associated with Cone-rod dystrophy. In some embodiment, the pathogenic mutations/SNPs are present in at least one gene selected from RPGRIP1, DRAM2, ABCA4, ADAM9, and CACNA1F, including at least the followings:

### NM_020366.3(RPGRIP1):c.154C>T (p.Arg52Ter)

### NM_178454.5(DRAM2):c.494G>A (p.Trp165Ter)

### NM_178454.5(DRAM2):c.131G>A (p.Ser44Asn)

### NM_000350.2(ABCA4):c.161G>A (p.Cys54Tyr)

### NM_000350.2(ABCA4):c.5714+5G>A

### NM_000350.2(ABCA4):c.880C>T (p.Gln294Ter)

### NM_000350.2(ABCA4):c.6079C>T (p.Leu2027Phe)

### NM_000350.2(ABCA4):c.3113C>T (p.Ala1038Val)

### NM_000350.2(ABCA4):c.634C>T (p.Arg212Cys)

### NM_003816.2(ADAM9):c.490C>T (p.Arg164Ter)

### NM_005183.3(CACNA1F):c.244C>T (p.Arg82Ter)

[1241] See Table A. Accordingly, an aspect of the invention relates to a method for treating or preventing Cone-rod dystrophy by correcting one or more pathogenic G-to-A or C-to-T mutations/SNPs, particularly one or more pathogenic G-to-A or C-to-T mutations/SNPs present in at least one gene selected from RPGRIP1, DRAM2, ABCA4, ADAM9, and CACNA1F, and more particularly one or more pathogenic G-to-A or C-to-T mutations/SNPs described above.

### Congenital Stationary Night Blindness

[1242] In some embodiments, the methods, systems, and compositions described herein are used to correct one or more pathogenic G-to-A or C-to-T mutations/SNPs associated with Congenital Stationary Night Blindness. In some embodiment, the pathogenic mutations/SNPs are present in at least one gene selected from GRM6, TRPM1, GPR179, and CACNA1F, including at least the followings:

### NM_000843.3(GRM6):c.1462C>T (p.Gln488Ter)

### NM_002420.5(TRPM1):c.2998C>T (p.Arg1000Ter)

### NM_001004334.3(GPR179):c.673C>T (p.Gln225Ter)

### NM_005183.3(CACNA1F):c.2576+1G>A

[1243] See Table A. Accordingly, an aspect of the invention relates to a method for treating or preventing Congenital Stationary Night Blindness by correcting one or more pathogenic G-to-A or C-to-T mutations/SNPs, particularly one or more pathogenic G-to-A or C-to-T mutations/SNPs present in at least one gene selected from GRM6, TRPM1, GPR179, and CACNA1F, and more particularly one or more pathogenic G-to-A or C-to-T mutations/SNPs described above.

### Usher Syndrome

[1244] In some embodiments, the methods, systems, and compositions described herein are used to correct one or more pathogenic G-to-A or C-to-T mutations/SNPs associated with Usher Syndrome. In some embodiment, the pathogenic mutations/SNPs are present in at least one gene selected from MYO7A, USH1C, CDH23, PCDH15, USH2A, ADGRV1, WHRN, and CLRN1, including at least the followings:

### NM_000260.3(MYO7A):c.640G>A (p.Gly214Arg)

### NM_000260.3(MYO7A):c.1200+1G>A

### NM_000260.3(MYO7A):c.141G>A (p.Trp47Ter)

### NM_000260.3(MYO7A):c.1556G>A (p.Gly519Asp)

### NM_000260.3(MYO7A):c.1900C>T (p.Arg634Ter)

### NM_000260.3(MYO7A):c.1963C>T (p.Gln655Ter)

### NM_000260.3(MYO7A):c.2094+1G>A

### NM_000260.3(MYO7A):c.4293G>A (p.Trp1431Ter)

### NM_000260.3(MYO7A):c.5101C>T (p.Arg1701Ter)

### NM_000260.3(MYO7A):c.5617C>T (p.Arg1873Trp)

### NM_000260.3(MYO7A):c.5660C>T (p.Pro1887Leu)

### NM_000260.3(MYO7A):c.6070C>T (p.Arg2024Ter)

### NM_000260.3(MYO7A):c.470+1G>A

### NM_000260.3(MYO7A):c.5968C>T (p.Gln1990Ter)

### NM_000260.3(MYO7A):c.3719G>A (p.Arg1240Gln)

### NM_000260.3(MYO7A):c.494C>T (p.Thr165Met)

### NM_000260.3(MYO7A):c.5392C>T (p.Gln1798Ter)

### NM_000260.3(MYO7A):c.5648G>A (p.Arg1883Gln)

### NM_000260.3(MYO7A):c.448C>T (p.Arg150Ter)

### NM_000260.3(MYO7A):c.700C>T (p.Gln234Ter)

### NM_000260.3(MYO7A):c.635G>A (p.Arg212His)

### NM_000260.3(MYO7A):c.1996C>T (p.Arg666Ter)

### NM_005709.3(USH1C):c.216G>A (p.Val72=)

### NM_022124.5(CDH23):c.7362+5G>A

### NM_022124.5(CDH23):c.3481C>T (p.Arg1161Ter)

### NM_022124.5(CDH23):c.3628C>T (p.Gln1210Ter)

### NM_022124.5(CDH23):c.5272C>T (p.Gln1758Ter)

### NM_022124.5(CDH23):c.5712+1G>A

### NM_022124.5(CDH23):c.5712G>A (p.Thr1904=)

### NM_022124.5(CDH23):c.5923+1G>A

### NM_022124.5(CDH23):c.6049+1G>A

### NM_022124.5(CDH23):c.7776G>A (p.Trp2592Ter)

### NM_022124.5(CDH23):c.9556C>T (p.Arg3186Ter)

### NM_022124.5(CDH23):c.3706C>T (p.Arg1236Ter)

### NM_022124.5(CDH23):c.4309C>T (p.Arg1437Ter)

### NM_022124.5(CDH23):c.6050−9G>A

### NM_033056.3(PCDH15):c.3316C>T (p.Arg1106Ter)

### NM_033056.3(PCDH15):c.7C>T (p.Arg3Ter)

### NM_033056.3(PCDH15):c.1927C>T (p.Arg643Ter)

### NM_001142772.1(PCDH15):c.400C>T (p.Arg134Ter)

### NM_033056.3(PCDH15):c.3358C>T (p.Arg1120Ter)

### NM_206933.2(USH2A):c.11048−1G>A

### NM_206933.2(USH2A):c.1143+1G>A

### NM_206933.2(USH2A):c.11954G>A (p.Trp3985Ter)

### NM_206933.2(USH2A):c.12868C>T (p.Gln4290Ter)

### NM_206933.2(USH2A):c.14180G>A (p.Trp4727Ter)

### NM_206933.2(USH2A):c.14911C>T (p.Arg4971Ter)

### NM_206933.2(USH2A):c.5788C>T (p.Arg1930Ter)

### NM_206933.2(USH2A):c.5858−1G>A

### NM_206933.2(USH2A):c.6224G>A (p.Trp2075Ter)

### NM_206933.2(USH2A):c.820C>T (p.Arg274Ter)

### NM_206933.2(USH2A):c.8981G>A (p.Trp2994Ter)

### NM_206933.2(USH2A):c.9304C>T (p.Gln3102Ter)

### NM_206933.2(USH2A):c.13010C>T (p.Thr4337Met)

### NM_206933.2(USH2A):c.14248C>T (p.Gln4750Ter)

### NM_206933.2(USH2A):c.6398G>A (p.Trp2133Ter)

### NM_206933.2(USH2A):c.632G>A (p.Trp211Ter)

### NM_206933.2(USH2A):c.6601C>T (p.Gln2201Ter)

### NM_206933.2(USH2A):c.13316C>T (p.Thr4439Ile)

### NM_206933.2(USH2A):c.4405C>T (p.Gln1469Ter)

### NM_206933.2(USH2A):c.9570+1G>A

### NM_206933.2(USH2A):c.8740C>T (p.Arg2914Ter)

### NM_206933.2(USH2A):c.8681+1G>A

### NM_206933.2(USH2A):c.1000C>T (p.Arg334Trp)

### NM_206933.2(USH2A):c.14175G>A (p.Trp4725Ter)

### NM_206933.2(USH2A):c.9390G>A (p.Trp3130Ter)

### NM_206933.2(USH2A):c.908G>A (p.Arg303His)

### NM_206933.2(USH2A):c.5776+1G>A

### NM_206933.2(USH2A):c.11156G>A (p.Arg3719His)

### NM_032119.3(ADGRV1):c.2398C>T (p.Arg800Ter)

### NM_032119.3(ADGRV1):c.7406G>A (p.Trp2469Ter)

### NM_032119.3(ADGRV1):c.12631C>T (p.Arg4211Ter)

### NM_032119.3(ADGRV1):c.7129C>T (p.Arg2377Ter)

### NM_032119.3(ADGRV1):c.14885G>A (p.Trp4962Ter)

### NM_015404.3(WHRN):c.1267C>T (p.Arg423Ter)

### NM_174878.2(CLRN1):c.619C>T (p.Arg207Ter)

[1245] See Table A. Accordingly, an aspect of the invention relates to a method for treating or preventing Enhanced Usher Syndrome by correcting one or more pathogenic G-to-A or C-to-T mutations/SNPs, particularly one or more pathogenic G-to-A or C-to-T mutations/SNPs present in at least one gene selected from MYO7A, USH1C, CDH23, PCDH15, USH2A, ADGRV1, WHRN, and CLRN1, and more particularly one or more pathogenic G-to-A or C-to-T mutations/SNPs described above.

### Leber Congenital Amaurosis

[1246] In some embodiments, the methods, systems, and compositions described herein are used to correct one or more pathogenic G-to-A or C-to-T mutations/SNPs associated with Leber Congenital Amaurosis. In some embodiment, the pathogenic mutations/SNPs are present in at least one gene selected from TULP1, RPE65, SPATA7, AIPL1, CRB1, NMNAT1, and PEX1, including at least the followings:

### NM_003322.5(TULP1):c.1495+1G>A

### NM_000329.2(RPE65):c.11+5G>A

### NM_018418.4(SPATA7):c.322C>T (p.Arg108Ter)

### NM_014336.4(AIPL1):c.784G>A (p.Gly262Ser)

### NM_201253.2(CRB1):c.1576C>T (p.Arg526Ter)

### NM_201253.2(CRB1):c.3307G>A (p.Gly1103Arg)

### NM_201253.2(CRB1):c.2843G>A (p.Cys948Tyr)

### NM_022787.3(NMNAT1):c.769G>A (p.Glu257Lys)

### NM_000466.2(PEX1):c.2528G>A (p.Gly843Asp)

[1247] See Table A. Accordingly, an aspect of the invention relates to a method for treating or preventing Leber Congenital Amaurosis by correcting one or more pathogenic G-to-A or C-to-T mutations/SNPs, particularly one or more pathogenic G-to-A or C-to-T mutations/SNPs present in at least one gene selected from TULP1, RPE65, SPATA7, AIPL1, CRB1, NMNAT1, and PEX1, and more particularly one or more pathogenic G-to-A or C-to-T mutations/SNPs described above.

### Retinitis Pigmentosa

[1248] In some embodiments, the methods, systems, and compositions described herein are used to correct one or more pathogenic G-to-A or C-to-T mutations/SNPs associated with Retinitis Pigmentosa. In some embodiment, the pathogenic mutations/SNPs are present in at least one gene selected from CRB1, IFT140, RP1, IMPDH1, PRPF31, RPGR, ABCA4, RPE65, EYS, NRL, FAM161A, NR2E3, USH2A, RHO, PDE6B, KLHL7, PDE6A, CNGB1, BEST1, C2orf71, PRPH2, CA4, CERKL, RPE65, PDE6B, and ADGRV1, including at least the followings:

### NM_001257965.1(CRB1):c.2711G>A (p.Cys904Tyr)

### NM_014714.3(IFT140):c.3827G>A (p.Gly1276Glu)

### NM_006269.1(RP1):c.2029C>T (p.Arg677Ter)

### NM_000883.3(IMPDH1):c.931G>A (p.Asp311Asn)

### NM_015629.3(PRPF31):c.1273C>T (p.Gln425Ter)

### NM_015629.3(PRPF31):c.1073+1G>A

### NM_000328.2(RPGR):c.1387C>T (p.Gln463Ter)

### NM_000350.2(ABCA4):c.4577C>T (p.Thr1526Met)

### NM_000350.2(ABCA4):c.6229C>T (p.Arg2077Trp)

### NM_000329.2(RPE65):c.271C>T (p.Arg91Trp)

### NM_001142800.1(EYS):c.2194C>T (p.Gln732Ter)

### NM_001142800.1(EYS):c.490C>T (p.Arg164Ter)

### NM_006177.3(NRL):c.151C>T (p.Pro51Ser)

### NM_001201543.1(FAM161A):c.1567C>T (p.Arg523Ter)

### NM_014249.3(NR2E3):c.166G>A (p.Gly56Arg)

### NM_206933.2(USH2A):c.2209C>T (p.Arg737Ter)

### NM_206933.2(USH2A):c.14803C>T (p.Arg4935Ter)

### NM_206933.2(USH2A):c.10073G>A (p.Cys3358Tyr)

### NM_000539.3(RHO):c.541G>A (p.Glu181Lys)

### NM_000283.3(PDE6B):c.892C>T (p.Gln298Ter)

### NM_001031710.2(KLHL7):c.458C>T (p.Ala153Val)

### NM_000440.2(PDE6A):c.1926+1G>A

### NM_001297.4(CNGB1):c.2128C>T (p.Gln710Ter)

### NM_001297.4(CNGB1):c.952C>T (p.Gln318Ter)

### NM_004183.3(BEST1):c.682G>A (p.Asp228Asn)

### NM_001029883.2(C2orf71):c.1828C>T (p.Gln610Ter)

### NM_000322.4(PRPH2):c.647C>T (p.Pro216Leu)

### NM_000717.4(CA4):c.40C>T (p.Arg14Trp)

### NM_201548.4(CERKL):c.769C>T (p.Arg257Ter)

### NM_000329.2(RPE65):c.118G>A (p.Gly40Ser)

### NM_000322.4(PRPH2):c.499G>A (p.Gly167Ser)

### NM_000539.3(RHO):c.403C>T (p.Arg135Trp)

### NM_000283.3(PDE6B):c.2193+1G>A

### NM_032119.3(ADGRV1):c.6901C>T (p.Gln2301Ter)

[1249] See Table A. Accordingly, an aspect of the invention relates to a method for treating or preventing Retinitis Pigmentosa by correcting one or more pathogenic G-to-A or C-to-T mutations/SNPs, particularly one or more pathogenic G-to-A or C-to-T mutations/SNPs present in at least one gene selected from CRB1, IFT140, RP1, IMPDH1, PRPF31, RPGR, ABCA4, RPE65, EYS, NRL, FAM161A, NR2E3, USH2A, RHO, PDE6B, KLHL7, PDE6A, CNGB1, BEST1, C2orf71, PRPH2, CA4, CERKL, RPE65, PDE6B, and ADGRV1, and more particularly one or more pathogenic G-to-A or C-to-T mutations/SNPs described above.

### Achromatopsia

[1250] In some embodiments, the methods, systems, and compositions described herein are used to correct one or more pathogenic G-to-A or C-to-T mutations/SNPs associated with Achromatopsia. In some embodiment, the pathogenic mutations/SNPs are present in at least one gene selected from CNGA3, CNGB3, and ATF6, including at least the followings:

### NM_001298.2(CNGA3):c.847C>T (p.Arg283Trp)

### NM_001298.2(CNGA3):c.101+1G>A

### NM_001298.2(CNGA3):c.1585G>A (p.Val529Met)

### NM_019098.4(CNGB3):c.1578+1G>A

### NM_019098.4(CNGB3):c.607C>T (p.Arg203Ter)

### NM_019098.4(CNGB3):c.1119G>A (p.Trp373Ter)

### NM_007348.3(ATF6):c.970C>T (p.Arg324Cys)

[1251] See Table A. Accordingly, an aspect of the invention relates to a method for treating or preventing Achromatopsia by correcting one or more pathogenic G-to-A or C-to-T mutations/SNPs, particularly one or more pathogenic G-to-A or C-to-T mutations/SNPs present in at least one gene selected from CNGA3, CNGB3, and ATF6, and more particularly one or more pathogenic G-to-A or C-to-T mutations/SNPs described above.

### Diseases Affecting Hearing

[1252] Pathogenic G-to-A or C-to-T mutations/SNPs associated with various diseases affecting hearing are reported in the ClinVar database and disclosed in Table A, including but not limited to deafness and Nonsyndromic hearing loss. Accordingly, an aspect of the invention relates to a method for correcting one or more pathogenic G-to-A or C-to-T mutations/SNPs associated with any of these diseases, as discussed below.

### Deafness

[1253] Gao et al. (Nature. 2017 Dec. 20. doi: 10.1038/nature25164. [Epub ahead of print]) reported genome editing using CRISPR-Cas9 to target Tmc1 gene in mice and reduce progressive hearing loss and deafness In some embodiments, the methods, systems, and compositions described herein are used to correct one or more pathogenic G-to-A or C-to-T mutations/SNPs associated with deafness. In some embodiment, the pathogenic mutations/SNPs are present in at least one gene selected from FGF3, MYO7A, STRC, ACTG1, SLC17A8, TMC1, GJB2, MYH14, COCH, CDH23, USH1C, GJB2, MYO7A, PCDH15, MYO15A, MYO3A, WHRN, DFNB59, TMC1, LOXHD1, TMPRSS3, OTOGL, OTOF, JAG1, and MARVELD2, including at least the followings:

### NM_005247.2(FGF3):c.283C>T (p.Arg95Trp)

### NM_000260.3(MYO7A):c.652G>A (p.Asp218Asn)

### NM_000260.3(MYO7A):c.689C>T (p.Ala230Val)

### NM_153700.2(STRC):c.4057C>T (p.Gln1353Ter)

### NM_001614.3(ACTG1):c.721G>A (p.Glu241Lys)

### NM_139319.2(SLC17A8):c.632C>T (p.Ala211Val)

### NM_138691.2(TMC1):c.1714G>A (p.Asp572Asn)

### NM_004004.5(GJB2):c.598G>A (p.Gly200Arg)

### NM_004004.5(GJB2):c.71G>A (p.Trp24Ter)

### NM_004004.5(GJB2):c.416G>A (p.Ser139Asn)

### NM_004004.5(GJB2):c.224G>A (p.Arg75Gln)

### NM_004004.5(GJB2):c.95G>A (p.Arg32His)

### NM_004004.5(GJB2):c.250G>A (p.Val84Met)

### NM_004004.5(GJB2):c.428G>A (p.Arg143Gln)

### NM_004004.5(GJB2):c.551G>A (p.Arg184Gln)

### NM_004004.5(GJB2):c.223C>T (p.Arg75Trp)

### NM_024729.3(MYH14):c.359C>T (p.Ser120Leu)

### NM_004086.2(COCH):c.151C>T (p.Pro51Ser)

### NM_022124.5(CDH23):c.4021G>A (p.Asp1341Asn)

### NM_153700.2(STRC):c.4701+1G>A

### NM_153676.3(USH1C):c.496+1G>A

### NM_004004.5(GJB2):c.131G>A (p.Trp44Ter)

### NM_004004.5(GJB2):c.283G>A (p.Val95Met)

### NM_004004.5(GJB2):c.298C>T (p.His100Tyr)

### NM_004004.5(GJB2):c.427C>T (p.Arg143Trp)

### NM_004004.5(GJB2):c.109G>A (p.Val37Ile)

### NM_004004.5(GJB2):c.−23+1G>A

### NM_004004.5(GJB2):c.148G>A (p.Asp50Asn)

### NM_004004.5(GJB2):c.134G>A (p.Gly45Glu)

### NM_004004.5(GJB2):c.370C>T (p.Gln124Ter)

### NM_004004.5(GJB2):c.230G>A (p.Trp77Ter)

### NM_004004.5(GJB2):c.231G>A (p.Trp77Ter)

### NM_000260.3(MYO7A):c.5899C>T (p.Arg1967Ter)

### NM_000260.3(MYO7A):c.2005C>T (p.Arg669Ter)

### NM_033056.3(PCDH15):c.733C>T (p.Arg245Ter)

### NM_016239.3(MYO15A):c.3866+1G>A

### NM_016239.3(MYO15A):c.6178−1G>A

### NM_016239.3(MYO15A):c.8714−1G>A

### NM_017433.4(MYO3A):c.2506−1G>A

### NM_015404.3(WHRN):c.1417−1G>A

### NM_001042702.3(DFNB59):c.499C>T (p.Arg167Ter)

### NM_138691.2(TMC1):c.100C>T (p.Arg34Ter)

### NM_138691.2(TMC1):c.1165C>T (p.Arg389Ter)

### NM_144612.6(LOXHD1):c.2008C>T (p.Arg670Ter)

### NM_144612.6(LOXHD1):c.4714C>T (p.Arg1572Ter)

### NM_144612.6(LOXHD1):c.4480C>T (p.Arg1494Ter)

### NM_024022.2(TMPRSS3):c.325C>T (p.Arg109Trp)

### NM_173591.3(OTOGL):c.3076C>T (p.Gln1026Ter)

### NM_194248.2(OTOF):c.4483C>T (p.Arg1495Ter)

### NM_194248.2(OTOF):c.2122C>T (p.Arg708Ter)

### NM_194248.2(OTOF):c.2485C>T (p.Gln829Ter)

### NM_001038603.2(MARVELD2):c.1498C>T (p.Arg500Ter)

[1254] See Table A. Accordingly, an aspect of the invention relates to a method for treating or preventing deafness by correcting one or more pathogenic G-to-A or C-to-T mutations/SNPs, particularly one or more pathogenic G-to-A or C-to-T mutations/SNPs present in at least one gene selected from FGF3, MYO7A, STRC, ACTG1, SLC17A8, TMC1, GJB2, MYH14, COCH, CDH23, USH1C, GJB2, MYO7A, PCDH15, MYO15A, MYO3A, WHRN, DFNB59, TMC1, LOXHD1, TMPRSS3, OTOGL, OTOF, JAG1, and MARVELD2, and more particularly one or more pathogenic G-to-A or C-to-T mutations/SNPs described above.

### Nonsyndromic Hearing Loss

[1255] In some embodiments, the methods, systems, and compositions described herein are used to correct one or more pathogenic G-to-A or C-to-T mutations/SNPs associated with Nonsyndromic hearing loss. In some embodiment, the pathogenic mutations/SNPs are present in at least one gene selected from GJB2, POU3F4, MYO15A, TMPRSS3, LOXHD1, OTOF, MYO6, OTOA, STRC, TRIOBP, MARVELD2, TMC1, TECTA, OTOGL, and GIPC3, including at least the followings:

### NM_004004.5(GJB2):c.169C>T (p.Gln57Ter)

### NM_000307.4(POU3F4):c.499C>T (p.Arg167Ter)

### NM_016239.3(MYO15A):c.8767C>T (p.Arg2923Ter)

### NM_024022.2(TMPRSS3):c.323-6G>A

### NM_024022.2(TMPRSS3):c.916G>A (p.Ala306Thr)

### NM_144612.6(LOXHD1):c.2497C>T (p.Arg833Ter)

### NM_194248.2(OTOF):c.2153G>A (p.Trp718Ter)

### NM_194248.2(OTOF):c.2818C>T (p.Gln940Ter)

### NM_194248.2(OTOF):c.4799+1G>A

### NM_004999.3(MYO6):c.826C>T (p.Arg276Ter)

### NM_144672.3(OTOA):c.1880+1G>A

### NM_153700.2(STRC):c.5188C>T (p.Arg1730Ter)

### NM_153700.2(STRC):c.3670C>T (p.Arg1224Ter)

### NM_153700.2(STRC):c.4402C>T (p.Arg1468Ter)

### NM_024022.2(TMPRSS3):c.1192C>T (p.Gln398Ter)

### NM_001039141.2(TRIOBP):c.6598C>T (p.Arg2200Ter)

### NM_016239.3(MYO15A):c.7893+1G>A

### NM_016239.3(MYO15A):c.5531+1G>A

### NM_016239.3(MYO15A):c.6046+1G>A

### NM_144612.6(LOXHD1):c.3169C>T (p.Arg1057Ter)

### NM_001038603.2(MARVELD2):c.1331+1G>A

### NM_138691.2(TMC1):c.1676G>A (p.Trp559Ter)

### NM_138691.2(TMC1):c.1677G>A (p.Trp559Ter)

### NM_005422.2(TECTA):c.5977C>T (p.Arg1993Ter)

### NM_173591.3(OTOGL):c.4987C>T (p.Arg1663Ter)

### NM_153700.2(STRC):c.3493C>T (p.Gln1165Ter)

### NM_153700.2(STRC):c.3217C>T (p.Arg1073Ter)

### NM_016239.3(MYO15A):c.5896C>T (p.Arg1966Ter)

### NM_133261.2(GIPC3):c.411+1G>A

[1256] See Table A. Accordingly, an aspect of the invention relates to a method for treating or preventing Nonsyndromic hearing loss by correcting one or more pathogenic G-to-A or C-to-T mutations/SNPs, particularly one or more pathogenic G-to-A or C-to-T mutations/SNPs present in at least one gene selected from GJB2, POU3F4, MYO15A, TMPRSS3, LOXHD1, OTOF, MYO6, OTOA, STRC, TRIOBP, MARVELD2, TMC1, TECTA, OTOGL, and GIPC3, and more particularly one or more pathogenic G-to-A or C-to-T mutations/SNPs described above.

### Blood Disorders

[1257] Pathogenic G-to-A or C-to-T mutations/SNPs associated with various blood disorders are reported in the ClinVar database and disclosed in Table A, including but not limited to Beta-thalassemia, Hemophilia A, Hemophilia B, Hemophilia C, and Wiskott-Aldrich syndrome. Accordingly, an aspect of the invention relates to a method for correcting one or more pathogenic G-to-A or C-to-T mutations/SNPs associated with any of these diseases, as discussed below.

### Beta-Thalassemia

[1258] In some embodiments, the methods, systems, and compositions described herein are used to correct one or more pathogenic G-to-A or C-to-T mutations/SNPs associated with Beta-thalassemia. In some embodiment, the pathogenic mutations/SNPs are present in at least the HBB gene, including at least the followings:

### NM_000518.4(HBB):c.−137C>T

### NM_000518.4(HBB):c.−50-88C>T

### NM_000518.4(HBB):c.−140C>T

### NM_000518.4(HBB):c.316-197C>T

### NM_000518.4(HBB):c.93-21G>A

### NM_000518.4(HBB):c.114G>A (p.Trp38Ter)

### NM_000518.4(HBB):c.118C>T (p.Gln40Ter)

### NM_000518.4(HBB):c.92+1G>A

### NM_000518.4(HBB):c.315+1G>A

### NM_000518.4(HBB):c.92+5G>A

### NM_000518.4(HBB):c.−50-101C>T

[1259] See Table A. Accordingly, an aspect of the invention relates to a method for treating or preventing Beta-thalassemia by correcting one or more pathogenic G-to-A or C-to-T mutations/SNPs, particularly one or more pathogenic G-to-A or C-to-T mutations/SNPs present in the HBB gene, and more particularly one or more pathogenic G-to-A or C-to-T mutations/SNPs described above.

### Hemophilia A

[1260] In some embodiments, the methods, systems, and compositions described herein are used to correct one or more pathogenic G-to-A or C-to-T mutations/SNPs associated with Hemophilia A. In some embodiment, the pathogenic mutations/SNPs are present in at least the F8 gene, including at least the followings:

### NM_000132.3(F8):c.3169G>A (p.Glu1057Lys)

### NM_000132.3(F8):c.902G>A (p.Arg301His)

### NM_000132.3(F8):c.1834C>T (p.Arg612Cys)

[1261] See Table A. Accordingly, an aspect of the invention relates to a method for treating or preventing Hemophilia A by correcting one or more pathogenic G-to-A or C-to-T mutations/SNPs, particularly one or more pathogenic G-to-A or C-to-T mutations/SNPs present in the F8 gene, and more particularly one or more pathogenic G-to-A or C-to-T mutations/SNPs described above.

### Factor V Leiden

[1262] In some embodiments, the methods, systems, and compositions described herein are used to correct Factor V Leiden mutations. This disease-causing single point mutation (G1746->A) represents the most abundant genetic risk factor in heritable multifactorial thrombophilia in the Caucasian population. Due to the point mutation, a single amino acid substitution (R534[RIGHTWARDS ARROW]Q) appears at the Protein C dependent proteolytic cleavage site (R533R534) of the blood coagulation factor F5. Whereas the heterozygous defect is accompanied by an only minor increase in thrombosis risk (ca. 8-fold), the homozygous defect has a much more pronounced effect (>80-fold increased risk).19 Directed RNA editing has the potential to compensate for this genetic defect by its repair at the RNA level.

### Hemophilia B

[1263] In some embodiments, the methods, systems, and compositions described herein are used to correct one or more pathogenic G-to-A or C-to-T mutations/SNPs associated with Hemophilia B. In some embodiment, the pathogenic mutations/SNPs are present in at least the F9 gene, including at least the followings:

### NM_000133.3(F9):c.835G>A (p.Ala279Thr)

[1264] See Table A. Accordingly, an aspect of the invention relates to a method for treating or preventing Hemophilia B by correcting one or more pathogenic G-to-A or C-to-T mutations/SNPs, particularly one or more pathogenic G-to-A or C-to-T mutations/SNPs present in the F9 gene, and more particularly one or more pathogenic G-to-A or C-to-T mutations/SNPs described above.

### Hemophilia C

[1265] In some embodiments, the methods, systems, and compositions described herein are used to correct one or more pathogenic G-to-A or C-to-T mutations/SNPs associated with Hemophilia C. In some embodiment, the pathogenic mutations/SNPs are present in at least the F11 gene, including at least the followings:

### NM_000128.3(F11):c.400C>T (p.Gln134Ter)

### NM_000128.3(F11):c.1432G>A (p.Gly478Arg)

### NM_000128.3(F11):c.1288G>A (p.Ala430Thr)

### NM_000128.3(F11):c.326−1G>A

[1266] See Table A. Accordingly, an aspect of the invention relates to a method for treating or preventing Hemophilia C by correcting one or more pathogenic G-to-A or C-to-T mutations/SNPs, particularly one or more pathogenic G-to-A or C-to-T mutations/SNPs present in the F11 gene, and more particularly one or more pathogenic G-to-A or C-to-T mutations/SNPs described above.

### Wiskott-Aldrich Syndrome

[1267] In some embodiments, the methods, systems, and compositions described herein are used to correct one or more pathogenic G-to-A or C-to-T mutations/SNPs associated with Wiskott-Aldrich syndrome. In some embodiment, the pathogenic mutations/SNPs are present in at least the WAS gene, including at least the followings:

### NM_000377.2(WAS):c.37C>T (p.Arg13Ter)

### NM_000377.2(WAS):c.257G>A (p.Arg86His)

### NM_000377.2(WAS):c.777+1G>A

[1268] See Table A. Accordingly, an aspect of the invention relates to a method for treating or preventing Wiskott-Aldrich syndrome by correcting one or more pathogenic G-to-A or C-to-T mutations/SNPs, particularly one or more pathogenic G-to-A or C-to-T mutations/SNPs present in the WAS gene, and more particularly one or more pathogenic G-to-A or C-to-T mutations/SNPs described above.

### Liver Diseases

[1269] Pathogenic G-to-A or C-to-T mutations/SNPs associated with various liver diseases are reported in the ClinVar database and disclosed in Table A, including but not limited to Transthyretin amyloidosis, Alpha-1-antitrypsin deficiency, Wilson's disease, and Phenylketonuria. Accordingly, an aspect of the invention relates to a method for correcting one or more pathogenic G-to-A or C-to-T mutations/SNPs associated with any of these diseases, as discussed below.

### Transthyretin Amyloidosis

[1270] In some embodiments, the methods, systems, and compositions described herein are used to correct one or more pathogenic G-to-A or C-to-T mutations/SNPs associated with Transthyretin amyloidosis. In some embodiment, the pathogenic mutations/SNPs are present in at least the TTR gene, including at least the followings:

### NM_000371.3(TTR):c.424G>A (p.Val142Ile)

### NM_000371.3(TTR):c.148G>A (p.Val50Met)

### NM_000371.3(TTR):c.118G>A (p.Val40Ile)

[1271] See Table A. Accordingly, an aspect of the invention relates to a method for treating or preventing Transthyretin amyloidosis by correcting one or more pathogenic G-to-A or C-to-T mutations/SNPs, particularly one or more pathogenic G-to-A or C-to-T mutations/SNPs present in the TTR gene, and more particularly one or more pathogenic G-to-A or C-to-T mutations/SNPs described above.

### Alpha-1-Antitrypsin Deficiency

[1272] In some embodiments, the methods, systems, and compositions described herein are used to correct one or more pathogenic G-to-A or C-to-T mutations/SNPs associated with Alpha-1-antitrypsin deficiency. In some embodiment, the pathogenic mutations/SNPs are present in at least the SERPINA1 gene, including at least the followings:

### NM_000295.4(SERPINA1):c.538C>T (p.Gln180Ter)

### NM_001127701.1(SERPINA1):c.1178C>T (p.Pro393Leu)

### NM_001127701.1(SERPINA1):c.230C>T (p.Ser77Phe)

### NM_001127701.1(SERPINA1):c.1096G>A (p.Glu366Lys)

### NM_000295.4(SERPINA1):c.1177C>T (p.Pro393Ser)

[1273] See Table A. Accordingly, an aspect of the invention relates to a method for treating or preventing Alpha-1-antitrypsin deficiency by correcting one or more pathogenic G-to-A or C-to-T mutations/SNPs, particularly one or more pathogenic G-to-A or C-to-T mutations/SNPs present in the SERPINA1 gene, and more particularly one or more pathogenic G-to-A or C-to-T mutations/SNPs described above.
Wilson's disease

[1274] In some embodiments, the methods, systems, and compositions described herein are used to correct one or more pathogenic G-to-A or C-to-T mutations/SNPs associated with Wilson's disease. In some embodiment, the pathogenic mutations/SNPs are present in at least the ATP7B gene, including at least the followings:

### NM_000053.3(ATP7B):c.2293G>A (p.Asp765Asn)

### NM_000053.3(ATP7B):c.3955C>T (p.Arg1319Ter)

### NM_000053.3(ATP7B):c.2865+1G>A

### NM_000053.3(ATP7B):c.3796G>A (p.Gly1266Arg)

### NM_000053.3(ATP7B):c.2621C>T (p.Ala874Val)

### NM_000053.3(ATP7B):c.2071G>A (p.Gly691Arg)

### NM_000053.3(ATP7B):c.2128G>A (p.Gly710Ser)

### NM_000053.3(ATP7B):c.2336G>A (p.Trp779Ter)

### NM_000053.3(ATP7B):c.4021G>A (p.Gly1341Ser)

### NM_000053.3(ATP7B):c.3182G>A (p.Gly1061Glu)

### NM_000053.3(ATP7B):c.4114C>T (p.Gln1372Ter)

### NM_000053.3(ATP7B):c.1708−1G>A

### NM_000053.3(ATP7B):c.865C>T (p.Gln289Ter)

### NM_000053.3(ATP7B):c.2930C>T (p.Thr977Met)

### NM_000053.3(ATP7B):c.3659C>T (p.Thr1220Met)

### NM_000053.3(ATP7B):c.2605G>A (p.Gly869Arg)

### NM_000053.3(ATP7B):c.2975C>T (p.Pro992Leu)

### NM_000053.3(ATP7B):c.2519C>T (p.Pro840Leu)

### NM_000053.3(ATP7B):c.2906G>A (p.Arg969Gln)

[1275] See Table A. Accordingly, an aspect of the invention relates to a method for treating or preventing Wilson's disease by correcting one or more pathogenic G-to-A or C-to-T mutations/SNPs, particularly one or more pathogenic G-to-A or C-to-T mutations/SNPs present in the ATP7B gene, and more particularly one or more pathogenic G-to-A or C-to-T mutations/SNPs described above.

### Phenylketonuria

[1276] In some embodiments, the methods, systems, and compositions described herein are used to correct one or more pathogenic G-to-A or C-to-T mutations/SNPs associated with Phenylketonuria. In some embodiment, the pathogenic mutations/SNPs are present in at least the PAH gene, including at least the followings:

### NM_000277.1(PAH):c.1315+1G>A

### NM_000277.1(PAH):c.1222C>T (p.Arg408Trp)

### NM_000277.1(PAH):c.838G>A (p.Glu280Lys)

### NM_000277.1(PAH):c.331C>T (p.Arg111Ter)

### NM_000277.1(PAH):c.782G>A (p.Arg261Gln)

### NM_000277.1(PAH):c.754C>T (p.Arg252Trp)

### NM_000277.1(PAH):c.473G>A (p.Arg158Gln)

### NM_000277.1(PAH):c.727C>T (p.Arg243Ter)

### NM_000277.1(PAH):c.842C>T (p.Pro281Leu)

### NM_000277.1(PAH):c.728G>A (p.Arg243Gln)

### NM_000277.1(PAH):c.1066-11G>A

### NM_000277.1(PAH):c.781C>T (p.Arg261Ter)

### NM_000277.1(PAH):c.1223G>A (p.Arg408Gln)

### NM_000277.1(PAH):c.1162G>A (p.Val388Met)

### NM_000277.1(PAH):c.1066-3C>T

### NM_000277.1(PAH):c.1208C>T (p.Ala403Val)

### NM_000277.1(PAH):c.890G>A (p.Arg297His)

### NM_000277.1(PAH):c.926C>T (p.Ala309Val)

### NM_000277.1(PAH):c.441+1G>A

### NM_000277.1(PAH):c.526C>T (p.Arg176Ter)

### NM_000277.1(PAH):c.688G>A (p.Val230Ile)

### NM_000277.1(PAH):c.721C>T (p.Arg241Cys)

### NM_000277.1(PAH):c.745C>T (p.Leu249Phe)

### NM_000277.1(PAH):c.442−1G>A

### NM_000277.1(PAH):c.842+1G>A

### NM_000277.1(PAH):c.776C>T (p.Ala259Val)

### NM_000277.1(PAH):c.1200−1G>A

### NM_000277.1(PAH):c.912+1G>A

### NM_000277.1(PAH):c.1065+1G>A

### NM_000277.1(PAH):c.472C>T (p.Arg158Trp)

### NM_000277.1(PAH):c.755G>A (p.Arg252Gln)

### NM_000277.1(PAH):c.809G>A (p.Arg270Lys)

[1277] See Table A. Accordingly, an aspect of the invention relates to a method for treating or preventing Phenylketonuria by correcting one or more pathogenic G-to-A or C-to-T mutations/SNPs, particularly one or more pathogenic G-to-A or C-to-T mutations/SNPs present in the PAH gene, and more particularly one or more pathogenic G-to-A or C-to-T mutations/SNPs described above.

### Kidney Diseases

[1278] Pathogenic G-to-A or C-to-T mutations/SNPs associated with various kidney diseases are reported in the ClinVar database and disclosed in Table A, including but not limited to Autosomal recessive polycystic kidney disease and Renal carnitine transport defect. Accordingly, an aspect of the invention relates to a method for correcting one or more pathogenic G-to-A or C-to-T mutations/SNPs associated with any of these diseases, as discussed below.

### Autosomal Recessive Polycystic Kidney Disease

[1279] In some embodiments, the methods, systems, and compositions described herein are used to correct one or more pathogenic G-to-A or C-to-T mutations/SNPs associated with Autosomal recessive polycystic kidney disease. In some embodiment, the pathogenic mutations/SNPs are present in at least the PKHD1 gene, including at least the followings:

### NM_138694.3(PKHD1):c.10444C>T (p.Arg3482Cys)

### NM_138694.3(PKHD1):c.9319C>T (p.Arg3107Ter)

### NM_138694.3(PKHD1):c.1480C>T (p.Arg494Ter)

### NM_138694.3(PKHD1):c.707+1G>A

### NM_138694.3(PKHD1):c.1486C>T (p.Arg496Ter)

### NM_138694.3(PKHD1):c.8303−1G>A

### NM_138694.3(PKHD1):c.2854G>A (p.Gly952Arg)

### NM_138694.3(PKHD1):c.7194G>A (p.Trp2398Ter)

### NM_138694.3(PKHD1):c.10219C>T (p.Gln3407Ter)

### NM_138694.3(PKHD1):c.107C>T (p.Thr36Met)

### NM_138694.3(PKHD1):c.8824C>T (p.Arg2942Ter)

### NM_138694.3(PKHD1):c.982C>T (p.Arg328Ter)

### NM_138694.3(PKHD1):c.4870C>T (p.Arg1624Trp)

### NM_138694.3(PKHD1):c.1602+1G>A

### NM_138694.3(PKHD1):c.1694−1G>A

### NM_138694.3(PKHD1):c.2341C>T (p.Arg781Ter)

### NM_138694.3(PKHD1):c.2407+1G>A

### NM_138694.3(PKHD1):c.2452C>T (p.Gln818Ter)

### NM_138694.3(PKHD1):c.5236+1G>A

### NM_138694.3(PKHD1):c.6499C>T (p.Gln2167Ter)

### NM_138694.3(PKHD1):c.2725C>T (p.Arg909Ter)

### NM_138694.3(PKHD1):c.370C>T (p.Arg124Ter)

### NM_138694.3(PKHD1):c.2810G>A (p.Trp937Ter)

[1280] See Table A. Accordingly, an aspect of the invention relates to a method for treating or preventing Autosomal recessive polycystic kidney disease by correcting one or more pathogenic G-to-A or C-to-T mutations/SNPs, particularly one or more pathogenic G-to-A or C-to-T mutations/SNPs present in the PKHD1 gene, and more particularly one or more pathogenic G-to-A or C-to-T mutations/SNPs described above.

### Renal Carnitine Transport Defect

[1281] In some embodiments, the methods, systems, and compositions described herein are used to correct one or more pathogenic G-to-A or C-to-T mutations/SNPs associated with Renal carnitine transport defect. In some embodiment, the pathogenic mutations/SNPs are present in at least the SLC22A5 gene, including at least the followings:

### NM_003060.3(SLC22A5):c.760C>T (p.Arg254Ter)

### NM_003060.3(SLC22A5):c.396G>A (p.Trp132Ter)

### NM_003060.3(SLC22A5):c.844C>T (p.Arg282Ter)

### NM_003060.3(SLC22A5):c.505C>T (p.Arg169Trp)

### NM_003060.3(SLC22A5):c.1319C>T (p.Thr440Met)

### NM_003060.3(SLC22A5):c.1195C>T (p.Arg399Trp)

### NM_003060.3(SLC22A5):c.695C>T (p.Thr232Met)

### NM_003060.3(SLC22A5):c.845G>A (p.Arg282Gln)

### NM_003060.3(SLC22A5):c.1193C>T (p.Pro398Leu)

### NM_003060.3(SLC22A5):c.1463G>A (p.Arg488His)

### NM_003060.3(SLC22A5):c.338G>A (p.Cys113Tyr)

### NM_003060.3(SLC22A5):c.136C>T (p.Pro46Ser)

### NM_003060.3(SLC22A5):c.506G>A (p.Arg169Gln)

[1282] See Table A. Accordingly, an aspect of the invention relates to a method for treating or preventing Renal carnitine transport defect by correcting one or more pathogenic G-to-A or C-to-T mutations/SNPs, particularly one or more pathogenic G-to-A or C-to-T mutations/SNPs present in the SLC22A5 gene, and more particularly one or more pathogenic G-to-A or C-to-T mutations/SNPs described above.

### Cardiovascular Disease

[1283] The embodiments disclosed herein can directly be used to treat or prevent cardiovascular diseases for known targets. Khera et al. (Nat Rev Genet. 2017 June; 18(6):331-344. doi: 10.1038/nrg.2016.160. Epub 2017 Mar. 13) described common variant association studies linking approximately 60 genetic loci to coronary risk used to facilitate a better understanding of causal risk factors, underlying biology development of new therapeutics. Khera explains, for example that inactivating mutations in PCSK9 decreased levels of circulating LDL cholesterol and reduced risk of CAD leading to intense interest in development of PCSK9 inhibitors. Further, antisense oligonucleotides designed to mimic protective mutations in APOC3 or LPA demonstrated a ˜70% reduction in triglyceride levels and 80% reduction in circulating lipoprotein(a) levels, respectively. In addition, Wang et al., (Arterioscler Thromb Vasc Biol. 2016 May; 36(5):783-6. doi: 10.1161/ATVBAHA.116.307227. Epub 2016 Mar. 3) and Ding et al. (Circ Res. 2014 Aug. 15; 115(5):488-92. doi: 10.1161/CIRCRESAHA.115.304351. Epub 2014 Jun. 10.) report the use of CRISPR to target the gene Pcsk9 for the prevention of cardiovascular disease.

### Muscle Diseases

[1284] Pathogenic G-to-A or C-to-T mutations/SNPs associated with various muscle diseases are reported in the ClinVar database and disclosed in Table A, including but not limited to Duchenne muscular dystrophy, Becker muscular dystrophy, Limb-girdle muscular dystrophy, Emery-Dreifuss muscular dystrophy, and Facioscapulohumeral muscular dystrophy. Accordingly, an aspect of the invention relates to a method for correcting one or more pathogenic G-to-A or C-to-T mutations/SNPs associated with any of these diseases, as discussed below.

### Duchenne Muscular Dystrophy

[1285] In some embodiments, the methods, systems, and compositions described herein are used to correct one or more pathogenic G-to-A or C-to-T mutations/SNPs associated with Duchenne muscular dystrophy. In some embodiment, the pathogenic mutations/SNPs are present in at least the DMD gene, including at least the followings:

### NM_004006.2(DMD):c.2797C>T (p.Gln933Ter)

### NM_004006.2(DMD):c.4870C>T (p.Gln1624Ter)

### NM_004006.2(DMD):c.5551C>T (p.Gln1851Ter)

### NM_004006.2(DMD):c.3188G>A (p.Trp1063Ter)

### NM_004006.2(DMD):c.8357G>A (p.Trp2786Ter)

### NM_004006.2(DMD):c.7817G>A (p.Trp2606Ter)

### NM_004006.2(DMD):c.7755G>A (p.Trp2585Ter)

### NM_004006.2(DMD):c.5917C>T (p.Gln1973Ter)

### NM_004006.2(DMD):c.5641C>T (p.Gln1881Ter)

### NM_004006.2(DMD):c.5131C>T (p.Gln1711Ter)

### NM_004006.2(DMD):c.4240C>T (p.Gln1414Ter)

### NM_004006.2(DMD):c.3427C>T (p.Gln1143Ter)

### NM_004006.2(DMD):c.2407C>T (p.Gln803Ter)

### NM_004006.2(DMD):c.2368C>T (p.Gln790Ter)

### NM_004006.2(DMD):c.1683G>A (p.Trp561Ter)

### NM_004006.2(DMD):c.1663C>T (p.Gln555Ter)

### NM_004006.2(DMD):c.1388G>A (p.Trp463Ter)

### NM_004006.2(DMD):c.1331+1G>A

### NM_004006.2(DMD):c.1324C>T (p.Gln442Ter)

### NM_004006.2(DMD):c.355C>T (p.Gln119Ter)

### NM_004006.2(DMD):c.94−1G>A

### NM_004006.2(DMD):c.5506C>T (p.Gln1836Ter)

### NM_004006.2(DMD):c.1504C>T (p.Gln502Ter)

### NM_004006.2(DMD):c.5032C>T (p.Gln1678Ter)

### NM_004006.2(DMD):c.457C>T (p.Gln153Ter)

### NM_004006.2(DMD):c.1594C>T (p.Gln532Ter)

### NM_004006.2(DMD):c.1150−1G>A

### NM_004006.2(DMD):c.6223C>T (p.Gln2075Ter)

### NM_004006.2(DMD):c.3747G>A (p.Trp1249Ter)

### NM_004006.2(DMD):c.2861G>A (p.Trp954Ter)

### NM_004006.2(DMD):c.9563+1G>A

### NM_004006.2(DMD):c.4483C>T (p.Gln1495Ter)

### NM_004006.2(DMD):c.4312C>T (p.Gln1438Ter)

### NM_004006.2(DMD):c.8209C>T (p.Gln2737Ter)

### NM_004006.2(DMD):c.4071+1G>A

### NM_004006.2(DMD):c.2665C>T (p.Arg889Ter)

### NM_004006.2(DMD):c.2202G>A (p.Trp734Ter)

### NM_004006.2(DMD):c.2077C>T (p.Gln693Ter)

### NM_004006.2(DMD):c.1653G>A (p.Trp551Ter)

### NM_004006.2(DMD):c.1061G>A (p.Trp354Ter)

### NM_004006.2(DMD):c.8914C>T (p.Gln2972Ter)

### NM_004006.2(DMD):c.6118−1G>A

### NM_004006.2(DMD):c.4729C>T (p.Arg1577Ter)

[1286] See Table A. Accordingly, an aspect of the invention relates to a method for treating or preventing Duchenne muscular dystrophy by correcting one or more pathogenic G-to-A or C-to-T mutations/SNPs, particularly one or more pathogenic G-to-A or C-to-T mutations/SNPs present in the DMD gene, and more particularly one or more pathogenic G-to-A or C-to-T mutations/SNPs described above.

### Becker Muscular Dystrophy

[1287] In some embodiments, the methods, systems, and compositions described herein are used to correct one or more pathogenic G-to-A or C-to-T mutations/SNPs associated with Becker muscular dystrophy. In some embodiment, the pathogenic mutations/SNPs are present in at least the DMD gene, including at least the followings:

### NM_004006.2(DMD):c.3413G>A (p.Trp1138Ter)

### NM_004006.2(DMD):c.358−1G>A

### NM_004006.2(DMD):c.10108C>T (p.Arg3370Ter)

### NM_004006.2(DMD):c.6373C>T (p.Gln2125Ter)

### NM_004006.2(DMD):c.9568C>T (p.Arg3190Ter)

### NM_004006.2(DMD):c.8713C>T (p.Arg2905Ter)

### NM_004006.2(DMD):c.1615C>T (p.Arg539Ter)

### NM_004006.2(DMD):c.3151C>T (p.Arg1051Ter)

### NM_004006.2(DMD):c.3432+1G>A

### NM_004006.2(DMD):c.5287C>T (p.Arg1763Ter)

### NM_004006.2(DMD):c.5530C>T (p.Arg1844Ter)

### NM_004006.2(DMD):c.8608C>T (p.Arg2870Ter)

### NM_004006.2(DMD):c.8656C>T (p.Gln2886Ter)

### NM_004006.2(DMD):c.8944C>T (p.Arg2982Ter)

### NM_004006.2(DMD):c.5899C>T (p.Arg1967Ter)

### NM_004006.2(DMD):c.10033C>T (p.Arg3345Ter)

### NM_004006.2(DMD):c.10086+1G>A

### NM_004019.2(DMD):c.1020G>A (p.Thr340=)

### NM_004006.2(DMD):c.1261C>T (p.Gln421Ter)

### NM_004006.2(DMD):c.1465C>T (p.Gln489Ter)

### NM_004006.2(DMD):c.1990C>T (p.Gln664Ter)

### NM_004006.2(DMD):c.2032C>T (p.Gln678Ter)

### NM_004006.2(DMD):c.2332C>T (p.Gln778Ter)

### NM_004006.2(DMD):c.2419C>T (p.Gln807Ter)

### NM_004006.2(DMD):c.2650C>T (p.Gln884Ter)

### NM_004006.2(DMD):c.2804−1G>A

### NM_004006.2(DMD):c.3276+1G>A

### NM_004006.2(DMD):c.3295C>T (p.Gln1099Ter)

### NM_004006.2(DMD):c.336G>A (p.Trp112Ter)

### NM_004006.2(DMD):c.3580C>T (p.Gln1194Ter)

### NM_004006.2(DMD):c.4117C>T (p.Gln1373Ter)

### NM_004006.2(DMD):c.649+1G>A

### NM_004006.2(DMD):c.6906G>A (p.Trp2302Ter)

### NM_004006.2(DMD):c.7189C>T (p.Gln2397Ter)

### NM_004006.2(DMD):c.7309+1G>A

### NM_004006.2(DMD):c.7657C>T (p.Arg2553Ter)

### NM_004006.2(DMD):c.7682G>A (p.Trp2561Ter)

### NM_004006.2(DMD):c.7683G>A (p.Trp2561Ter)

### NM_004006.2(DMD):c.7894C>T (p.Gln2632Ter)

### NM_004006.2(DMD):c.9361+1G>A

### NM_004006.2(DMD):c.9564−1G>A

### NM_004006.2(DMD):c.2956C>T (p.Gln986Ter)

### NM_004006.2(DMD):c.883C>T (p.Arg295Ter)

### NM_004006.2(DMD):c.31+36947G>A

### NM_004006.2(DMD):c.10279C>T (p.Gln3427Ter)

### NM_004006.2(DMD):c.433C>T (p.Arg145Ter)

### NM_004006.2(DMD):c.9G>A (p.Trp3Ter)

### NM_004006.2(DMD):c.10171C>T (p.Arg3391Ter)

### NM_004006.2(DMD):c.583C>T (p.Arg195Ter)

### NM_004006.2(DMD):c.9337C>T (p.Arg3113Ter)

### NM_004006.2(DMD):c.8038C>T (p.Arg2680Ter)

### NM_004006.2(DMD):c.1812+1G>A

### NM_004006.2(DMD):c.1093C>T (p.Gln365Ter)

### NM_004006.2(DMD):c.1704+1G>A

### NM_004006.2(DMD):c.1912C>T (p.Gln638Ter)

### NM_004006.2(DMD):c.133C>T (p.Gln45Ter)

### NM_004006.2(DMD):c.5868G>A (p.Trp1956Ter)

### NM_004006.2(DMD):c.565C>T (p.Gln189Ter)

### NM_004006.2(DMD):c.5089C>T (p.Gln1697Ter)

### NM_004006.2(DMD):c.2512C>T (p.Gln838Ter)

### NM_004006.2(DMD):c.10477C>T (p.Gln3493Ter)

### NM_004006.2(DMD):c.93+1G>A

### NM_004006.2(DMD):c.4174C>T (p.Gln1392Ter)

[1288] NM_004006.2(DMD):c.3940C>T (p.Arg1314Ter)See Table A. Accordingly, an aspect of the invention relates to a method for treating or preventing Becker muscular dystrophy by correcting one or more pathogenic G-to-A or C-to-T mutations/SNPs, particularly one or more pathogenic G-to-A or C-to-T mutations/SNPs present in the DMD gene, and more particularly one or more pathogenic G-to-A or C-to-T mutations/SNPs described above.

### Limb-Girdle Muscular Dystrophy

[1289] In some embodiments, the methods, systems, and compositions described herein are used to correct one or more pathogenic G-to-A or C-to-T mutations/SNPs associated with Limb-girdle muscular dystrophy. In some embodiment, the pathogenic mutations/SNPs are present in at least one gene selected from SGCB, MYOT, LMNA, CAPN3, DYSF, SGCA, TTN, ANO5, TRAPPC11, LMNA, POMT1, and FKRP, including at least the followings:

### NM_000232.4(SGCB):c.31C>T (p.Gln11Ter)

### NM_006790.2(MYOT):c.164C>T (p.Ser55Phe)

### NM_006790.2(MYOT):c.170C>T (p.Thr57Ile)

### NM_170707.3(LMNA):c.1488+1G>A

### NM_170707.3(LMNA):c.1609−1G>A

### NM_000070.2(CAPN3):c.1715G>A (p.Arg572Gln)

### NM_000070.2(CAPN3):c.2243G>A (p.Arg748Gln)

### NM_000070.2(CAPN3):c.145C>T (p.Arg49Cys)

### NM_000070.2(CAPN3):c.1319G>A (p.Arg440Gln)

### NM_000070.2(CAPN3):c.1343G>A (p.Arg448His)

### NM_000070.2(CAPN3):c.1465C>T (p.Arg489Trp)

### NM_000070.2(CAPN3):c.1714C>T (p.Arg572Trp)

### NM_000070.2(CAPN3):c.2306G>A (p.Arg769Gln)

### NM_000070.2(CAPN3):c.133G>A (p.Ala45Thr)

### NM_000070.2(CAPN3):c.499−1G>A

### NM_000070.2(CAPN3):c.439C>T (p.Arg147Ter)

### NM_000070.2(CAPN3):c.1063C>T (p.Arg355Trp)

### NM_000070.2(CAPN3):c.1250C>T (p.Thr417Met)

### NM_000070.2(CAPN3):c.245C>T (p.Pro82Leu)

### NM_000070.2(CAPN3):c.2242C>T (p.Arg748Ter)

### NM_000070.2(CAPN3):c.1318C>T (p.Arg440Trp)

### NM_000070.2(CAPN3):c.1333G>A (p.Gly445Arg)

### NM_000070.2(CAPN3):c.1957C>T (p.Gln653Ter)

### NM_000070.2(CAPN3):c.1801−1G>A

### NM_000070.2(CAPN3):c.2263+1G>A

### NM_000070.2(CAPN3):c.956C>T (p.Pro319Leu)

### NM_000070.2(CAPN3):c.1468C>T (p.Arg490Trp)

### NM_000070.2(CAPN3):c.802−9G>A

### NM_000070.2(CAPN3):c.1342C>T (p.Arg448Cys)

### NM_000070.2(CAPN3):c.1303G>A (p.Glu435Lys)

### NM_000070.2(CAPN3):c.1993−1G>A

### NM_003494.3(DYSF):c.3113G>A (p.Arg1038Gln)

### NM_001130987.1(DYSF):c.5174+1G>A

### NM_001130987.1(DYSF):c.159G>A (p.Trp53Ter)

### NM_001130987.1(DYSF):c.2929C>T (p.Arg977Trp)

### NM_001130987.1(DYSF):c.4282C>T (p.Gln1428Ter)

### NM_001130987.1(DYSF):c.1577−1G>A

### NM_003494.3(DYSF):c.5529G>A (p.Trp1843Ter)

### NM_001130987.1(DYSF):c.1576+1G>A

### NM_001130987.1(DYSF):c.4462C>T (p.Gln1488Ter)

### NM_003494.3(DYSF):c.5429G>A (p.Arg1810Lys)

### NM_003494.3(DYSF):c.5077C>T (p.Arg1693Trp)

### NM_001130978.1(DYSF):c.1813C>T (p.Gln605Ter)

### NM_003494.3(DYSF):c.3230G>A (p.Trp1077Ter)

### NM_003494.3(DYSF):c.265C>T (p.Arg89Ter)

### NM_003494.3(DYSF):c.4434G>A (p.Trp1478Ter)

### NM_003494.3(DYSF):c.3478C>T (p.Gln1160Ter)

### NM_001130987.1(DYSF):c.1372G>A (p.Gly458Arg)

### NM_003494.3(DYSF):c.4090C>T (p.Gln1364Ter)

### NM_001130987.1(DYSF):c.2409+1G>A

### NM_003494.3(DYSF):c.1708C>T (p.Gln570Ter)

### NM_003494.3(DYSF):c.1956G>A (p.Trp652Ter)

### NM_001130987.1(DYSF):c.5004−1G>A

### NM_003494.3(DYSF):c.331C>T (p.Gln111Ter)

### NM_001130978.1(DYSF):c.5776C>T (p.Arg1926Ter)

### NM_003494.3(DYSF):c.6124C>T (p.Arg2042Cys)

### NM_003494.3(DYSF):c.2643+1G>A

### NM_003494.3(DYSF):c.4253G>A (p.Gly1418Asp)

### NM_003494.3(DYSF):c.610C>T (p.Arg204Ter)

### NM_003494.3(DYSF):c.1834C>T (p.Gln612Ter)

### NM_003494.3(DYSF):c.5668-7G>A

### NM_001130978.1(DYSF):c.3137G>A (p.Arg1046His)

### NM_003494.3(DYSF):c.1053+1G>A

### NM_003494.3(DYSF):c.1398−1G>A

### NM_003494.3(DYSF):c.1481−1G>A

### NM_003494.3(DYSF):c.2311C>T (p.Gln771Ter)

### NM_003494.3(DYSF):c.2869C>T (p.Gln957Ter)

### NM_003494.3(DYSF):c.4756C>T (p.Arg1586Ter)

### NM_003494.3(DYSF):c.5509G>A (p.Asp1837Asn)

### NM_003494.3(DYSF):c.5644C>T (p.Gln1882Ter)

### NM_003494.3(DYSF):c.5946+1G>A

### NM_003494.3(DYSF):c.937+1G>A

### NM_003494.3(DYSF):c.5266C>T (p.Gln1756Ter)

### NM_003494.3(DYSF):c.3832C>T (p.Gln1278Ter)

### NM_003494.3(DYSF):c.5525+1G>A

### NM_003494.3(DYSF):c.3112C>T (p.Arg1038Ter)

### NM_000023.3(SGCA):c.293G>A (p.Arg98His)

### NM_000023.3(SGCA):c.850C>T (p.Arg284Cys)

### NM_000023.3(SGCA):c.403C>T (p.Gln135Ter)

### NM_000023.3(SGCA):c.409G>A (p.Glu137Lys)

### NM_000023.3(SGCA):c.747+1G>A

### NM_000023.3(SGCA):c.229C>T (p.Arg77Cys)

### NM_000023.3(SGCA):c.101G>A (p.Arg34His)

### NM_000023.3(SGCA):c.739G>A (p.Val247Met)

### NM_001256850.1(TTN):c.87394C>T (p.Arg29132Ter)

### NM_213599.2(ANO5):c.762+1G>A

### NM_213599.2(ANO5):c.1213C>T (p.Gln405Ter)

### NM_213599.2(ANO5):c.1639C>T (p.Arg547Ter)

### NM_213599.2(ANO5):c.1406G>A (p.Trp469Ter)

### NM_213599.2(ANO5):c.1210C>T (p.Arg404Ter)

### NM_213599.2(ANO5):c.2272C>T (p.Arg758Cys)

### NM_213599.2(ANO5):c.41−1G>A

### NM_213599.2(ANO5):c.172C>T (p.Arg58Trp)

### NM_213599.2(ANO5):c.1898+1G>A

### NM_021942.5(TRAPPC11):c.1287+5G>A

### NM_170707.3(LMNA):c.1608+1G>A

### NM_007171.3(POMT1):c.1864C>T (p.Arg622Ter)

### NM_024301.4(FKRP):c.313C>T (p.Gln105Ter)

[1290] See Table A. Accordingly, an aspect of the invention relates to a method for treating or preventing Limb-girdle muscular dystrophy by correcting one or more pathogenic G-to-A or C-to-T mutations/SNPs, particularly one or more pathogenic G-to-A or C-to-T mutations/SNPs present in at least one gene selected from SGCB, MYOT, LMNA, CAPN3, DYSF, SGCA, TTN, ANO5, TRAPPC11, LMNA, POMT1, and FKRP, and more particularly one or more pathogenic G-to-A or C-to-T mutations/SNPs described above.

### Emery-Dreifuss Muscular Dystrophy

[1291] In some embodiments, the methods, systems, and compositions described herein are used to correct one or more pathogenic G-to-A or C-to-T mutations/SNPs associated with Emery-Dreifuss muscular dystrophy. In some embodiment, the pathogenic mutations/SNPs are present in at least the EMD or SYNE1 gene, including at least the followings:

### NM_000117.2(EMD):c.3G>A (p.Met1Ile)

### NM_033071.3(SYNE1):c.11908C>T (p.Arg3970Ter)

### NM_033071.3(SYNE1):c.21721C>T (p.Gln7241Ter)

### NM_000117.2(EMD):c.130C>T (p.Gln44Ter)

[1292] See Table A. Accordingly, an aspect of the invention relates to a method for treating or preventing Emery-Dreifuss muscular dystrophy by correcting one or more pathogenic G-to-A or C-to-T mutations/SNPs, particularly one or more pathogenic G-to-A or C-to-T mutations/SNPs present in the EMD or SYNE1 gene, and more particularly one or more pathogenic G-to-A or C-to-T mutations/SNPs described above.

### Facioscapulohumeral Muscular Dystrophy

[1293] In some embodiments, the methods, systems, and compositions described herein are used to correct one or more pathogenic G-to-A or C-to-T mutations/SNPs associated with Facioscapulohumeral muscular dystrophy. In some embodiment, the pathogenic mutations/SNPs are present in at least the SMCHD1 gene, including at least the followings:

### NM_015295.2(SMCHD1):c.3801+1G>A

### NM_015295.2(SMCHD1):c.1843−1G>A

[1294] See Table A. Accordingly, an aspect of the invention relates to a method for treating or preventing Facioscapulohumeral muscular dystrophy by correcting one or more pathogenic G-to-A or C-to-T mutations/SNPs, particularly one or more pathogenic G-to-A or C-to-T mutations/SNPs present in the SMCHID1 gene, and more particularly one or more pathogenic G-to-A or C-to-T mutations/SNPs described above.

### Inborn Errors of Metabolism (IEM)

[1295] Pathogenic G-to-A or C-to-T mutations/SNPs associated with various IEMs are reported in the ClinVar database and disclosed in Table A, including but not limited to Primary hyperoxaluria type 1, Argininosuccinate lyase deficiency, Ornithine carbamoyltransferase deficiency, and Maple syrup urine disease. Accordingly, an aspect of the invention relates to a method for correcting one or more pathogenic G-to-A or C-to-T mutations/SNPs associated with any of these diseases, as discussed below.

### Primary Hyperoxaluria Type 1

[1296] In some embodiments, the methods, systems, and compositions described herein are used to correct one or more pathogenic G-to-A or C-to-T mutations/SNPs associated with Primary hyperoxaluria type 1. In some embodiment, the pathogenic mutations/SNPs are present in at least the AGXT gene, including at least the followings:

### NM_000030.2(AGXT):c.245G>A (p.Gly82Glu)

### NM_000030.2(AGXT):c.698G>A (p.Arg233His)

### NM_000030.2(AGXT):c.466G>A (p.Gly156Arg)

### NM_000030.2(AGXT):c.106C>T (p.Arg36Cys)

### NM_000030.2(AGXT):c.346G>A (p.Gly116Arg)

### NM_000030.2(AGXT):c.568G>A (p.Gly190Arg)

### NM_000030.2(AGXT):c.653C>T (p.Ser218Leu)

### NM_000030.2(AGXT):c.737G>A (p.Trp246Ter)

### NM_000030.2(AGXT):c.1049G>A (p.Gly350Asp)

### NM_000030.2(AGXT):c.473C>T (p.Ser158Leu)

### NM_000030.2(AGXT):c.907C>T (p.Gln303Ter)

### NM_000030.2(AGXT):c.996G>A (p.Trp332Ter)

### NM_000030.2(AGXT):c.508G>A (p.Gly170Arg)

[1297] See Table A. Accordingly, an aspect of the invention relates to a method for treating or preventing Primary hyperoxaluria type 1 by correcting one or more pathogenic G-to-A or C-to-T mutations/SNPs, particularly one or more pathogenic G-to-A or C-to-T mutations/SNPs present in the AGXT gene, and more particularly one or more pathogenic G-to-A or C-to-T mutations/SNPs described above.

### Argininosuccinate Lyase Deficiency

[1298] In some embodiments, the methods, systems, and compositions described herein are used to correct one or more pathogenic G-to-A or C-to-T mutations/SNPs associated with Argininosuccinate lyase deficiency. In some embodiment, the pathogenic mutations/SNPs are present in at least the ASL gene, including at least the followings:

### NM_001024943.1(ASL):c.1153C>T (p.Arg385Cys)

### NM_000048.3(ASL):c.532G>A (p.Val178Met)

### NM_000048.3(ASL):c.545G>A (p.Arg182Gln)

### NM_000048.3(ASL):c.175G>A (p.Glu59Lys)

### NM_000048.3(ASL):c.718+5G>A

### NM_000048.3(ASL):c.889C>T (p.Arg297Trp)

### NM_000048.3(ASL):c.1360C>T (p.Gln454Ter)

### NM_000048.3(ASL):c.1060C>T (p.Gln354Ter)

### NM_000048.3(ASL):c.35G>A (p.Arg12Gln)

### NM_000048.3(ASL):c.446+1G>A

### NM_000048.3(ASL):c.544C>T (p.Arg182Ter)

### NM_000048.3(ASL):c.1135C>T (p.Arg379Cys)

[1299] See Table A. Accordingly, an aspect of the invention relates to a method for treating or preventing Argininosuccinate lyase deficiency by correcting one or more pathogenic G-to-A or C-to-T mutations/SNPs, particularly one or more pathogenic G-to-A or C-to-T mutations/SNPs present in the ASL gene, and more particularly one or more pathogenic G-to-A or C-to-T mutations/SNPs described above.

### Ornithine Carbamoyltransferase Deficiency

[1300] In some embodiments, the methods, systems, and compositions described herein are used to correct one or more pathogenic G-to-A or C-to-T mutations/SNPs associated with Ornithine carbamoyltransferase deficiency. In some embodiment, the pathogenic mutations/SNPs are present in at least the OTC gene, including at least the followings:

### NM_000531.5(OTC):c.119G>A (p.Arg40His)

### NM_000531.5(OTC):c.422G>A (p.Arg141Gln)

### NM_000531.5(OTC):c.829C>T (p.Arg277Trp)

### NM_000531.5(OTC):c.674C>T (p.Pro225Leu)

[1301] See Table A. Accordingly, an aspect of the invention relates to a method for treating or preventing Ornithine carbamoyltransferase deficiency by correcting one or more pathogenic G-to-A or C-to-T mutations/SNPs, particularly one or more pathogenic G-to-A or C-to-T mutations/SNPs present in the OTC gene, and more particularly one or more pathogenic G-to-A or C-to-T mutations/SNPs described above.

### Maple Syrup Urine Disease

[1302] In some embodiments, the methods, systems, and compositions described herein are used to correct one or more pathogenic G-to-A or C-to-T mutations/SNPs associated with Maple syrup urine disease. In some embodiment, the pathogenic mutations/SNPs are present in at least one gene selected from BCKDHA, BCKDHB, DBT, and DLD, including at least the followings:

### NM_000709.3(BCKDHA):c.476G>A (p.Arg159Gln)

### NM_183050.3(BCKDHB):c.3G>A (p.Met1Ile)

### NM_183050.3(BCKDHB):c.554C>T (p.Pro185Leu)

### NM_001918.3(DBT):c.1033G>A (p.Gly345Arg)

### NM_000709.3(BCKDHA):c.940C>T (p.Arg314Ter)

### NM_000709.3(BCKDHA):c.793C>T (p.Arg265Trp)

### NM_000709.3(BCKDHA):c.868G>A (p.Gly290Arg)

### NM_000108.4(DLD):c.1123G>A (p.Glu375Lys)

### NM_000709.3(BCKDHA):c.1234G>A (p.Val412Met)

### NM_000709.3(BCKDHA):c.288+1G>A

### NM_000709.3(BCKDHA):c.979G>A (p.Glu327Lys)

### NM_001918.3(DBT):c.901C>T (p.Arg301Cys)

### NM_183050.3(BCKDHB):c.509G>A (p.Arg170His)

### NM_183050.3(BCKDHB):c.799C>T (p.Gln267Ter)

### NM_183050.3(BCKDHB):c.853C>T (p.Arg285Ter)

### NM_183050.3(BCKDHB):c.970C>T (p.Arg324Ter)

### NM_183050.3(BCKDHB):c.832G>A (p.Gly278Ser)

### NM_000709.3(BCKDHA):c.1036C>T (p.Arg346Cys)

### NM_000709.3(BCKDHA):c.288+9C>T

### NM_000709.3(BCKDHA):c.632C>T (p.Thr211Met)

### NM_000709.3(BCKDHA):c.659C>T (p.Ala220Val)

### NM_000709.3(BCKDHA):c.964C>T (p.Gln322Ter)

### NM_001918.3(DBT):c.1291C>T (p.Arg431Ter)

### NM_001918.3(DBT):c.251G>A (p.Trp84Ter)

### NM_001918.3(DBT):c.871C>T (p.Arg291Ter)

### NM_000056.4(BCKDHB):c.1016C>T (p.Ser339Leu)

### NM_000056.4(BCKDHB):c.344−1G>A

### NM_000056.4(BCKDHB):c.633+1G>A

### NM_000056.4(BCKDHB):c.952−1G>A

[1303] See Table A. Accordingly, an aspect of the invention relates to a method for treating or preventing Maple syrup urine disease by correcting one or more pathogenic G-to-A or C-to-T mutations/SNPs, particularly one or more pathogenic G-to-A or C-to-T mutations/SNPs present in at least one gene selected from BCKDHA, BCKDHB, DBT, and DLD, and more particularly one or more pathogenic G-to-A or C-to-T mutations/SNPs described above.

### Cancer-Related Diseases

[1304] Pathogenic G-to-A or C-to-T mutations/SNPs associated with various cancers and cancer-related diseases are reported in the ClinVar database and disclosed in Table A, including but not limited to Breast-Ovarian Cancer and Lynch syndrome. Accordingly, an aspect of the invention relates to a method for correcting one or more pathogenic G-to-A or C-to-T mutations/SNPs associated with any of these diseases, as discussed below.

### Breast-Ovarian Cancer

[1305] In some embodiments, the methods, systems, and compositions described herein are used to correct one or more pathogenic G-to-A or C-to-T mutations/SNPs associated with Breast-Ovarian Cancer. In some embodiment, the pathogenic mutations/SNPs are present in at least the BRCA1 or BRCA2 gene, including at least the followings:

### NM_007294.3(BRCA1):c.5095C>T (p.Arg1699Trp)

### NM_000059.3(BRCA2):c.7558C>T (p.Arg2520Ter)

### NM_007294.3(BRCA1):c.2572C>T (p.Gln858Ter)

### NM_007294.3(BRCA1):c.3607C>T (p.Arg1203Ter)

### NM_007294.3(BRCA1):c.5503C>T (p.Arg1835Ter)

### NM_007294.3(BRCA1):c.2059C>T (p.Gln687Ter)

### NM_007294.3(BRCA1):c.4675+1G>A

### NM_007294.3(BRCA1):c.5251C>T (p.Arg1751Ter)

### NM_007294.3(BRCA1):c.5444G>A (p.Trp1815Ter)

### NM_000059.3(BRCA2):c.9318G>A (p.Trp3106Ter)

### NM_000059.3(BRCA2):c.9382C>T (p.Arg3128Ter)

### NM_000059.3(BRCA2):c.274C>T (p.Gln92Ter)

### NM_000059.3(BRCA2):c.6952C>T (p.Arg2318Ter)

### NM_007294.3(BRCA1):c.1687C>T (p.Gln563Ter)

### NM_007294.3(BRCA1):c.2599C>T (p.Gln867Ter)

### NM_007294.3(BRCA1):c.784C>T (p.Gln262Ter)

### NM_007294.3(BRCA1):c.280C>T (p.Gln94Ter)

### NM_007294.3(BRCA1):c.5542C>T (p.Gln1848Ter)

### NM_007294.3(BRCA1):c.5161C>T (p.Gln1721Ter)

### NM_007294.3(BRCA1):c.4573C>T (p.Gln1525Ter)

### NM_007294.3(BRCA1):c.4270C>T (p.Gln1424Ter)

### NM_007294.3(BRCA1):c.4225C>T (p.Gln1409Ter)

### NM_007294.3(BRCA1):c.4066C>T (p.Gln1356Ter)

### NM_007294.3(BRCA1):c.3679C>T (p.Gln1227Ter)

### NM_007294.3(BRCA1):c.1918C>T (p.Gln640Ter)

### NM_007294.3(BRCA1):c.963G>A (p.Trp321Ter)

### NM_007294.3(BRCA1):c.718C>T (p.Gln240Ter)

### NM_000059.3(BRCA2):c.9196C>T (p.Gln3066Ter)

### NM_000059.3(BRCA2):c.9154C>T (p.Arg3052Trp)

### NM_007294.3(BRCA1):c.3991C>T (p.Gln1331Ter)

### NM_007294.3(BRCA1):c.4097−1G>A

### NM_007294.3(BRCA1):c.1059G>A (p.Trp353Ter)

### NM_007294.3(BRCA1):c.1115G>A (p.Trp372Ter)

### NM_007294.3(BRCA1):c.1138C>T (p.Gln380Ter)

### NM_007294.3(BRCA1):c.1612C>T (p.Gln538Ter)

### NM_007294.3(BRCA1):c.1621C>T (p.Gln541Ter)

### NM_007294.3(BRCA1):c.1630C>T (p.Gln544Ter)

### NM_007294.3(BRCA1):c.178C>T (p.Gln60Ter)

### NM_007294.3(BRCA1):c.1969C>T (p.Gln657Ter)

### NM_007294.3(BRCA1):c.2275C>T (p.Gln759Ter)

### NM_007294.3(BRCA1):c.2410C>T (p.Gln804Ter)

### NM_007294.3(BRCA1):c.2869C>T (p.Gln957Ter)

### NM_007294.3(BRCA1):c.2923C>T (p.Gln975Ter)

### NM_007294.3(BRCA1):c.3268C>T (p.Gln1090Ter)

### NM_007294.3(BRCA1):c.3430C>T (p.Gln1144Ter)

### NM_007294.3(BRCA1):c.3544C>T (p.Gln1182Ter)

### NM_007294.3(BRCA1):c.4075C>T (p.Gln1359Ter)

### NM_007294.3(BRCA1):c.4201C>T (p.Gln1401Ter)

### NM_007294.3(BRCA1):c.4399C>T (p.Gln1467Ter)

### NM_007294.3(BRCA1):c.4552C>T (p.Gln1518Ter)

### NM_007294.3(BRCA1):c.5054C>T (p.Thr1685Ile)

### NM_007294.3(BRCA1):c.514C>T (p.Gln172Ter)

### NM_007294.3(BRCA1):c.5239C>T (p.Gln1747Ter)

### NM_007294.3(BRCA1):c.5266C>T (p.Gln1756Ter)

### NM_007294.3(BRCA1):c.5335C>T (p.Gln1779Ter)

### NM_007294.3(BRCA1):c.5345G>A (p.Trp1782Ter)

### NM_007294.3(BRCA1):c.5511G>A (p.Trp1837Ter)

### NM_007294.3(BRCA1):c.5536C>T (p.Gln1846Ter)

### NM_007294.3(BRCA1):c.55C>T (p.Gln19Ter)

### NM_007294.3(BRCA1):c.949C>T (p.Gln317Ter)

### NM_007294.3(BRCA1):c.928C>T (p.Gln310Ter)

### NM_007294.3(BRCA1):c.5117G>A (p.Gly1706Glu)

### NM_007294.3(BRCA1):c.5136G>A (p.Trp1712Ter)

### NM_007294.3(BRCA1):c.4327C>T (p.Arg1443Ter)

### NM_007294.3(BRCA1):c.1471C>T (p.Gln491Ter)

### NM_007294.3(BRCA1):c.1576C>T (p.Gln526Ter)

### NM_007294.3(BRCA1):c.160C>T (p.Gln54Ter)

### NM_007294.3(BRCA1):c.2683C>T (p.Gln895Ter)

### NM_007294.3(BRCA1):c.2761C>T (p.Gln921Ter)

### NM_007294.3(BRCA1):c.3895C>T (p.Gln1299Ter)

### NM_007294.3(BRCA1):c.4339C>T (p.Gln1447Ter)

### NM_007294.3(BRCA1):c.4372C>T (p.Gln1458Ter)

### NM_007294.3(BRCA1):c.5153G>A (p.Trp1718Ter)

### NM_007294.3(BRCA1):c.5445G>A (p.Trp1815Ter)

### NM_007294.3(BRCA1):c.5510G>A (p.Trp1837Ter)

### NM_007294.3(BRCA1):c.5346G>A (p.Trp1782Ter)

### NM_007294.3(BRCA1):c.1116G>A (p.Trp372Ter)

### NM_007294.3(BRCA1):c.1999C>T (p.Gln667Ter)

### NM_007294.3(BRCA1):c.4183C>T (p.Gln1395Ter)

### NM_007294.3(BRCA1):c.4810C>T (p.Gln1604Ter)

### NM_007294.3(BRCA1):c.850C>T (p.Gln284Ter)

### NM_007294.3(BRCA1):c.1058G>A (p.Trp353Ter)

### NM_007294.3(BRCA1):c.131G>A (p.Cys44Tyr)

### NM_007294.3(BRCA1):c.1600C>T (p.Gln534Ter)

### NM_007294.3(BRCA1):c.3286C>T (p.Gln1096Ter)

### NM_007294.3(BRCA1):c.3403C>T (p.Gln1135Ter)

### NM_007294.3(BRCA1):c.34C>T (p.Gln12Ter)

### NM_007294.3(BRCA1):c.4258C>T (p.Gln1420Ter)

### NM_007294.3(BRCA1):c.4609C>T (p.Gln1537Ter)

### NM_007294.3(BRCA1):c.5154G>A (p.Trp1718Ter)

### NM_007294.3(BRCA1):c.5431C>T (p.Gln1811Ter)

### NM_007294.3(BRCA1):c.241C>T (p.Gln81Ter)

### NM_007294.3(BRCA1):c.3331C>T (p.Gln1111Ter)

### NM_007294.3(BRCA1):c.3967C>T (p.Gln1323Ter)

### NM_007294.3(BRCA1):c.415C>T (p.Gln139Ter)

### NM_007294.3(BRCA1):c.505C>T (p.Gln169Ter)

### NM_007294.3(BRCA1):c.5194-12G>A

### NM_007294.3(BRCA1):c.5212G>A (p.Gly1738Arg)

### NM_007294.3(BRCA1):c.5332+1G>A

### NM_007294.3(BRCA1):c.1480C>T (p.Gln494Ter)

### NM_007294.3(BRCA1):c.2563C>T (p.Gln855Ter)

### NM_007294.3(BRCA1):c.1066C>T (p.Gln356Ter)

### NM_007294.3(BRCA1):c.3718C>T (p.Gln1240Ter)

### NM_007294.3(BRCA1):c.3817C>T (p.Gln1273Ter)

### NM_007294.3(BRCA1):c.3937C>T (p.Gln1313Ter)

### NM_007294.3(BRCA1):c.4357+1G>A

### NM_007294.3(BRCA1):c.5074+1G>A

### NM_007294.3(BRCA1):c.5277+1G>A

### NM_007294.3(BRCA1):c.2338C>T (p.Gln780Ter)

### NM_007294.3(BRCA1):c.3598C>T (p.Gln1200Ter)

### NM_007294.3(BRCA1):c.3841C>T (p.Gln1281Ter)

### NM_007294.3(BRCA1):c.4222C>T (p.Gln1408Ter)

### NM_007294.3(BRCA1):c.4524G>A (p.Trp1508Ter)

### NM_007294.3(BRCA1):c.5353C>T (p.Gln1785Ter)

### NM_007294.3(BRCA1):c.962G>A (p.Trp321Ter)

### NM_007294.3(BRCA1):c.220C>T (p.Gln74Ter)

### NM_007294.3(BRCA1):c.2713C>T (p.Gln905Ter)

### NM_007294.3(BRCA1):c.2800C>T (p.Gln934Ter)

### NM_007294.3(BRCA1):c.4612C>T (p.Gln1538Ter)

### NM_007294.3(BRCA1):c.3352C>T (p.Gln1118Ter)

### NM_007294.3(BRCA1):c.4834C>T (p.Gln1612Ter)

### NM_007294.3(BRCA1):c.4523G>A (p.Trp1508Ter)

### NM_007294.3(BRCA1):c.5135G>A (p.Trp1712Ter)

### NM_007294.3(BRCA1):c.1155G>A (p.Trp385Ter)

### NM_007294.3(BRCA1):c.4987−1G>A

### NM_000059.3(BRCA2):c.9573G>A (p.Trp3191Ter)

### NM_000059.3(BRCA2):c.1945C>T (p.Gln649Ter)

### NM_000059.3(BRCA2):c.217C>T (p.Gln73Ter)

### NM_000059.3(BRCA2):c.523C>T (p.Gln175Ter)

### NM_000059.3(BRCA2):c.2548C>T (p.Gln850Ter)

### NM_000059.3(BRCA2):c.2905C>T (p.Gln969Ter)

### NM_000059.3(BRCA2):c.4689G>A (p.Trp1563Ter)

### NM_000059.3(BRCA2):c.4972C>T (p.Gln1658Ter)

### NM_000059.3(BRCA2):c.1184G>A (p.Trp395Ter)

### NM_000059.3(BRCA2):c.2137C>T (p.Gln713Ter)

### NM_000059.3(BRCA2):c.3217C>T (p.Gln1073Ter)

### NM_000059.3(BRCA2):c.3523C>T (p.Gln1175Ter)

### NM_000059.3(BRCA2):c.4783C>T (p.Gln1595Ter)

### NM_000059.3(BRCA2):c.5800C>T (p.Gln1934Ter)

### NM_000059.3(BRCA2):c.6478C>T (p.Gln2160Ter)

### NM_000059.3(BRCA2):c.7033C>T (p.Gln2345Ter)

### NM_000059.3(BRCA2):c.7495C>T (p.Gln2499Ter)

### NM_000059.3(BRCA2):c.7501C>T (p.Gln2501Ter)

### NM_000059.3(BRCA2):c.7887G>A (p.Trp2629Ter)

### NM_000059.3(BRCA2):c.8910G>A (p.Trp2970Ter)

### NM_000059.3(BRCA2):c.9139C>T (p.Gln3047Ter)

### NM_000059.3(BRCA2):c.9739C>T (p.Gln3247Ter)

### NM_000059.3(BRCA2):c.582G>A (p.Trp194Ter)

### NM_000059.3(BRCA2):c.7963C>T (p.Gln2655Ter)

### NM_000059.3(BRCA2):c.8695C>T (p.Gln2899Ter)

### NM_000059.3(BRCA2):c.8869C>T (p.Gln2957Ter)

### NM_000059.3(BRCA2):c.1117C>T (p.Gln373Ter)

### NM_000059.3(BRCA2):c.1825C>T (p.Gln609Ter)

### NM_000059.3(BRCA2):c.2455C>T (p.Gln819Ter)

### NM_000059.3(BRCA2):c.2881C>T (p.Gln961Ter)

### NM_000059.3(BRCA2):c.3265C>T (p.Gln1089Ter)

### NM_000059.3(BRCA2):c.3283C>T (p.Gln1095Ter)

### NM_000059.3(BRCA2):c.3442C>T (p.Gln1148Ter)

### NM_000059.3(BRCA2):c.3871C>T (p.Gln1291Ter)

### NM_000059.3(BRCA2):c.439C>T (p.Gln147Ter)

### NM_000059.3(BRCA2):c.4525C>T (p.Gln1509Ter)

### NM_000059.3(BRCA2):c.475+1G>A

### NM_000059.3(BRCA2):c.5344C>T (p.Gln1782Ter)

### NM_000059.3(BRCA2):c.5404C>T (p.Gln1802Ter)

### NM_000059.3(BRCA2):c.5773C>T (p.Gln1925Ter)

### NM_000059.3(BRCA2):c.5992C>T (p.Gln1998Ter)

### NM_000059.3(BRCA2):c.6469C>T (p.Gln2157Ter)

### NM_000059.3(BRCA2):c.7261C>T (p.Gln2421Ter)

### NM_000059.3(BRCA2):c.7303C>T (p.Gln2435Ter)

### NM_000059.3(BRCA2):c.7471C>T (p.Gln2491Ter)

### NM_000059.3(BRCA2):c.7681C>T (p.Gln2561Ter)

### NM_000059.3(BRCA2):c.7738C>T (p.Gln2580Ter)

### NM_000059.3(BRCA2):c.7886G>A (p.Trp2629Ter)

### NM_000059.3(BRCA2):c.8140C>T (p.Gln2714Ter)

### NM_000059.3(BRCA2):c.8363G>A (p.Trp2788Ter)

### NM_000059.3(BRCA2):c.8572C>T (p.Gln2858Ter)

### NM_000059.3(BRCA2):c.8773C>T (p.Gln2925Ter)

### NM_000059.3(BRCA2):c.8821C>T (p.Gln2941Ter)

### NM_000059.3(BRCA2):c.9109C>T (p.Gln3037Ter)

### NM_000059.3(BRCA2):c.9317G>A (p.Trp3106Ter)

### NM_000059.3(BRCA2):c.9466C>T (p.Gln3156Ter)

### NM_000059.3(BRCA2):c.9572G>A (p.Trp3191Ter)

### NM_000059.3(BRCA2):c.8490G>A (p.Trp2830Ter)

### NM_000059.3(BRCA2):c.5980C>T (p.Gln1994Ter)

### NM_000059.3(BRCA2):c.7721G>A (p.Trp2574Ter)

### NM_000059.3(BRCA2):c.196C>T (p.Gln66Ter)

### NM_000059.3(BRCA2):c.7618−1G>A

### NM_000059.3(BRCA2):c.8489G>A (p.Trp2830Ter)

### NM_000059.3(BRCA2):c.7857G>A (p.Trp2619Ter)

### NM_000059.3(BRCA2):c.1261C>T (p.Gln421Ter)

### NM_000059.3(BRCA2):c.1456C>T (p.Gln486Ter)

### NM_000059.3(BRCA2):c.3319C>T (p.Gln1107Ter)

### NM_000059.3(BRCA2):c.5791C>T (p.Gln1931Ter)

### NM_000059.3(BRCA2):c.6070C>T (p.Gln2024Ter)

### NM_000059.3(BRCA2):c.7024C>T (p.Gln2342Ter)

### NM_000059.3(BRCA2):c.961C>T (p.Gln321Ter)

### NM_000059.3(BRCA2):c.9380G>A (p.Trp3127Ter)

### NM_000059.3(BRCA2):c.8364G>A (p.Trp2788Ter)

### NM_000059.3(BRCA2):c.7758G>A (p.Trp2586Ter)

### NM_000059.3(BRCA2):c.2224C>T (p.Gln742Ter)

### NM_000059.3(BRCA2):c.5101C>T (p.Gln1701Ter)

### NM_000059.3(BRCA2):c.5959C>T (p.Gln1987Ter)

### NM_000059.3(BRCA2):c.7060C>T (p.Gln2354Ter)

### NM_000059.3(BRCA2):c.9100C>T (p.Gln3034Ter)

### NM_000059.3(BRCA2):c.9148C>T (p.Gln3050Ter)

### NM_000059.3(BRCA2):c.9883C>T (p.Gln3295Ter)

### NM_000059.3(BRCA2):c.1414C>T (p.Gln472Ter)

### NM_000059.3(BRCA2):c.1689G>A (p.Trp563Ter)

### NM_000059.3(BRCA2):c.581G>A (p.Trp194Ter)

### NM_000059.3(BRCA2):c.6490C>T (p.Gln2164Ter)

### NM_000059.3(BRCA2):c.7856G>A (p.Trp2619Ter)

### NM_000059.3(BRCA2):c.8970G>A (p.Trp2990Ter)

### NM_000059.3(BRCA2):c.92G>A (p.Trp31Ter)

### NM_000059.3(BRCA2):c.9376C>T (p.Gln3126Ter)

### NM_000059.3(BRCA2):c.93G>A (p.Trp31Ter)

### NM_000059.3(BRCA2):c.1189C>T (p.Gln397Ter)

### NM_000059.3(BRCA2):c.2818C>T (p.Gln940Ter)

### NM_000059.3(BRCA2):c.2979G>A (p.Trp993Ter)

### NM_000059.3(BRCA2):c.3166C>T (p.Gln1056Ter)

### NM_000059.3(BRCA2):c.4285C>T (p.Gln1429Ter)

### NM_000059.3(BRCA2):c.6025C>T (p.Gln2009Ter)

### NM_000059.3(BRCA2):c.772C>T (p.Gln258Ter)

### NM_000059.3(BRCA2):c.7877G>A (p.Trp2626Ter)

### NM_000059.3(BRCA2):c.3109C>T (p.Gln1037Ter)

### NM_000059.3(BRCA2):c.4222C>T (p.Gln1408Ter)

### NM_000059.3(BRCA2):c.7480C>T (p.Arg2494Ter)

### NM_000059.3(BRCA2):c.7878G>A (p.Trp2626Ter)

### NM_000059.3(BRCA2):c.9076C>T (p.Gln3026Ter)

### NM_000059.3(BRCA2):c.1855C>T (p.Gln619Ter)

### NM_000059.3(BRCA2):c.4111C>T (p.Gln1371Ter)

### NM_000059.3(BRCA2):c.5656C>T (p.Gln1886Ter)

### NM_000059.3(BRCA2):c.7757G>A (p.Trp2586Ter)

### NM_000059.3(BRCA2):c.8243G>A (p.Gly2748Asp)

### NM_000059.3(BRCA2):c.8878C>T (p.Gln2960Ter)

### NM_000059.3(BRCA2):c.8487+1G>A

### NM_000059.3(BRCA2):c.8677C>T (p.Gln2893Ter)

### NM_000059.3(BRCA2):c.250C>T (p.Gln84Ter)

### NM_000059.3(BRCA2):c.6124C>T (p.Gln2042Ter)

### NM_000059.3(BRCA2):c.7617+1G>A

### NM_000059.3(BRCA2):c.8575C>T (p.Gln2859Ter)

### NM_000059.3(BRCA2):c.8174G>A (p.Trp2725Ter)

### NM_000059.3(BRCA2):c.3187C>T (p.Gln1063Ter)

### NM_000059.3(BRCA2):c.9381G>A (p.Trp3127Ter)

### NM_000059.3(BRCA2):c.2095C>T (p.Gln699Ter)

### NM_000059.3(BRCA2):c.1642C>T (p.Gln548Ter)

### NM_000059.3(BRCA2):c.8608C>T (p.Gln2870Ter)

### NM_000059.3(BRCA2):c.3412C>T (p.Gln1138Ter)

### NM_000059.3(BRCA2):c.4246C>T (p.Gln1416Ter)

### NM_000059.3(BRCA2):c.6475C>T (p.Gln2159Ter)

### NM_000059.3(BRCA2):c.7366C>T (p.Gln2456Ter)

### NM_000059.3(BRCA2):c.7516C>T (p.Gln2506Ter)

### NM_000059.3(BRCA2):c.8969G>A (p.Trp2990Ter)

### NM_000059.3(BRCA2):c.6487C>T (p.Gln2163Ter)

### NM_000059.3(BRCA2):c.2978G>A (p.Trp993Ter)

### NM_000059.3(BRCA2):c.7615C>T (p.Gln2539Ter)

### NM_000059.3(BRCA2):c.9106C>T (p.Gln3036Ter)

[1306] See Table A. Accordingly, an aspect of the invention relates to a method for treating or preventing Breast-Ovarian Cancer by correcting one or more pathogenic G-to-A or C-to-T mutations/SNPs, particularly one or more pathogenic G-to-A or C-to-T mutations/SNPs present in the BRCA1 or BRCA2 gene, and more particularly one or more pathogenic G-to-A or C-to-T mutations/SNPs described above.

### Lynch Syndrome

[1307] In some embodiments, the methods, systems, and compositions described herein are used to correct one or more pathogenic G-to-A or C-to-T mutations/SNPs associated with Lynch syndrome. In some embodiment, the pathogenic mutations/SNPs are present in at least one gene selected from MSH6, MSH2, EPCAM, PMS2, and MLH1, including at least the followings:

### NM_000179.2(MSH6):c.1045C>T (p.Gln349Ter)

### NM_000251.2(MSH2):c.1384C>T (p.Gln462Ter)

### NM_002354.2(EPCAM):c.133C>T (p.Gln45Ter)

### NM_002354.2(EPCAM):c.429G>A (p.Trp143Ter)

### NM_002354.2(EPCAM):c.523C>T (p.Gln175Ter)

### NM_000179.2(MSH6):c.2680C>T (p.Gln894Ter)

### NM_000251.2(MSH2):c.350G>A (p.Trp117Ter)

### NM_000179.2(MSH6):c.2735G>A (p.Trp912Ter)

### NM_000179.2(MSH6):c.3556+1G>A

### NM_000251.2(MSH2):c.388C>T (p.Gln130Ter)

### NM_000535.6(PMS2):c.1912C>T (p.Gln638Ter)

### NM_000535.6(PMS2):c.1891C>T (p.Gln631Ter)

### NM_000249.3(MLH1):c.454−1G>A

### NM_000251.2(MSH2):c.1030C>T (p.Gln344Ter)

### NM_000179.2(MSH6):c.2330G>A (p.Trp777Ter)

### NM_000179.2(MSH6):c.2191C>T (p.Gln731Ter)

### NM_000179.2(MSH6):c.2764C>T (p.Arg922Ter)

### NM_000179.2(MSH6):c.2815C>T (p.Gln939Ter)

### NM_000179.2(MSH6):c.3020G>A (p.Trp1007Ter)

### NM_000179.2(MSH6):c.3436C>T (p.Gln1146Ter)

### NM_000179.2(MSH6):c.3647−1G>A

### NM_000179.2(MSH6):c.3772C>T (p.Gln1258Ter)

### NM_000179.2(MSH6):c.3838C>T (p.Gln1280Ter)

### NM_000179.2(MSH6):c.706C>T (p.Gln236Ter)

### NM_000179.2(MSH6):c.730C>T (p.Gln244Ter)

### NM_000249.3(MLH1):c.1171C>T (p.Gln391Ter)

### NM_000249.3(MLH1):c.1192C>T (p.Gln398Ter)

### NM_000249.3(MLH1):c.1225C>T (p.Gln409Ter)

### NM_000249.3(MLH1):c.1276C>T (p.Gln426Ter)

### NM_000249.3(MLH1):c.1528C>T (p.Gln510Ter)

### NM_000249.3(MLH1):c.1609C>T (p.Gln537Ter)

### NM_000249.3(MLH1):c.1613G>A (p.Trp538Ter)

### NM_000249.3(MLH1):c.1614G>A (p.Trp538Ter)

### NM_000249.3(MLH1):c.1624C>T (p.Gln542Ter)

### NM_000249.3(MLH1):c.1684C>T (p.Gln562Ter)

### NM_000249.3(MLH1):c.1731+1G>A

### NM_000249.3(MLH1):c.1731+5G>A

### NM_000249.3(MLH1):c.1732−1G>A

### NM_000249.3(MLH1):c.1896G>A (p.Glu632=)

### NM_000249.3(MLH1):c.1989+1G>A

### NM_000249.3(MLH1):c.1990−1G>A

### NM_000249.3(MLH1):c.1998G>A (p.Trp666Ter)

### NM_000249.3(MLH1):c.208−1G>A

### NM_000249.3(MLH1):c.2101C>T (p.Gln701Ter)

### NM_000249.3(MLH1):c.2136G>A (p.Trp712Ter)

### NM_000249.3(MLH1):c.2224C>T (p.Gln742Ter)

### NM_000249.3(MLH1):c.230G>A (p.Cys77Tyr)

### NM_000249.3(MLH1):c.256C>T (p.Gln86Ter)

### NM_000249.3(MLH1):c.436C>T (p.Gln146Ter)

### NM_000249.3(MLH1):c.445C>T (p.Gln149Ter)

### NM_000249.3(MLH1):c.545G>A (p.Arg182Lys)

### NM_000249.3(MLH1):c.731G>A (p.Gly244Asp)

### NM_000249.3(MLH1):c.76C>T (p.Gln26Ter)

### NM_000249.3(MLH1):c.842C>T (p.Ala281Val)

### NM_000249.3(MLH1):c.882C>T (p.Leu294=)

### NM_000249.3(MLH1):c.901C>T (p.Gln301Ter)

### NM_000251.2(MSH2):c.1013G>A (p.Gly338Glu)

### NM_000251.2(MSH2):c.1034G>A (p.Trp345Ter)

### NM_000251.2(MSH2):c.1129C>T (p.Gln377Ter)

### NM_000251.2(MSH2):c.1183C>T (p.Gln395Ter)

### NM_000251.2(MSH2):c.1189C>T (p.Gln397Ter)

### NM_000251.2(MSH2):c.1204C>T (p.Gln402Ter)

### NM_000251.2(MSH2):c.1276+1G>A

### NM_000251.2(MSH2):c.1528C>T (p.Gln510Ter)

### NM_000251.2(MSH2):c.1552C>T (p.Gln518Ter)

### NM_000251.2(MSH2):c.1720C>T (p.Gln574Ter)

### NM_000251.2(MSH2):c.1777C>T (p.Gln593Ter)

### NM_000251.2(MSH2):c.1885C>T (p.Gln629Ter)

### NM_000251.2(MSH2):c.2087C>T (p.Pro696Leu)

### NM_000251.2(MSH2):c.2251G>A (p.Gly751Arg)

### NM_000251.2(MSH2):c.2291G>A (p.Trp764Ter)

### NM_000251.2(MSH2):c.2292G>A (p.Trp764Ter)

### NM_000251.2(MSH2):c.2446C>T (p.Gln816Ter)

### NM_000251.2(MSH2):c.2470C>T (p.Gln824Ter)

### NM_000251.2(MSH2):c.2536C>T (p.Gln846Ter)

### NM_000251.2(MSH2):c.2581C>T (p.Gln861Ter)

### NM_000251.2(MSH2):c.2634G>A (p.Glu878=)

### NM_000251.2(MSH2):c.2635C>T (p.Gln879Ter)

### NM_000251.2(MSH2):c.28C>T (p.Gln10Ter)

### NM_000251.2(MSH2):c.472C>T (p.Gln158Ter)

### NM_000251.2(MSH2):c.478C>T (p.Gln160Ter)

### NM_000251.2(MSH2):c.484G>A (p.Gly162Arg)

### NM_000251.2(MSH2):c.490G>A (p.Gly164Arg)

### NM_000251.2(MSH2):c.547C>T (p.Gln183Ter)

### NM_000251.2(MSH2):c.577C>T (p.Gln193Ter)

### NM_000251.2(MSH2):c.643C>T (p.Gln215Ter)

### NM_000251.2(MSH2):c.645+1G>A

### NM_000251.2(MSH2):c.652C>T (p.Gln218Ter)

### NM_000251.2(MSH2):c.754C>T (p.Gln252Ter)

### NM_000251.2(MSH2):c.792+1G>A

### NM_000251.2(MSH2):c.942G>A (p.Gln314=)

### NM_000535.6(PMS2):c.949C>T (p.Gln317Ter)

### NM_000249.3(MLH1):c.306+1G>A

### NM_000249.3(MLH1):c.62C>T (p.Ala21Val)

### NM_000251.2(MSH2):c.1865C>T (p.Pro622Leu)

### NM_000179.2(MSH6):c.426G>A (p.Trp142Ter)

### NM_000251.2(MSH2):c.715C>T (p.Gln239Ter)

### NM_000249.3(MLH1):c.350C>T (p.Thr117Met)

### NM_000251.2(MSH2):c.1915C>T (p.His639Tyr)

### NM_000251.2(MSH2):c.289C>T (p.Gln97Ter)

### NM_000251.2(MSH2):c.2785C>T (p.Arg929Ter)

### NM_000249.3(MLH1):c.131C>T (p.Ser44Phe)

### NM_000249.3(MLH1):c.1219C>T (p.Gln407Ter)

### NM_000249.3(MLH1):c.306+5G>A

### NM_000251.2(MSH2):c.1801C>T (p.Gln601Ter)

### NM_000535.6(PMS2):c.1144+1G>A

### NM_000251.2(MSH2):c.1984C>T (p.Gln662Ter)

### NM_000249.3(MLH1):c.381−1G>A

### NM_000535.6(PMS2):c.631C>T (p.Arg211Ter)

### NM_000251.2(MSH2):c.790C>T (p.Gln264Ter)

### NM_000251.2(MSH2):c.366+1G>A

### NM_000249.3(MLH1):c.298C>T (p.Arg100Ter)

### NM_000179.2(MSH6):c.3013C>T (p.Arg1005Ter)

### NM_000179.2(MSH6):c.694C>T (p.Gln232Ter)

### NM_000179.2(MSH6):c.742C>T (p.Arg248Ter)

### NM_000249.3(MLH1):c.1039−1G>A

### NM_000249.3(MLH1):c.142C>T (p.Gln48Ter)

### NM_000249.3(MLH1):c.1790G>A (p.Trp597Ter)

### NM_000249.3(MLH1):c.1961C>T (p.Pro654Leu)

### NM_000249.3(MLH1):c.2103+1G>A

### NM_000249.3(MLH1):c.2135G>A (p.Trp712Ter)

### NM_000249.3(MLH1):c.588+5G>A

### NM_000249.3(MLH1):c.790+1G>A

### NM_000251.2(MSH2):c.1035G>A (p.Trp345Ter)

### NM_000251.2(MSH2):c.1255C>T (p.Gln419Ter)

### NM_000251.2(MSH2):c.1861C>T (p.Arg621Ter)

### NM_000251.2(MSH2):c.226C>T (p.Gln76Ter)

### NM_000251.2(MSH2):c.2653C>T (p.Gln885Ter)

### NM_000251.2(MSH2):c.508C>T (p.Gln170Ter)

### NM_000251.2(MSH2):c.862C>T (p.Gln288Ter)

### NM_000251.2(MSH2):c.892C>T (p.Gln298Ter)

### NM_000251.2(MSH2):c.970C>T (p.Gln324Ter)

### NM_000179.2(MSH6):c.4001G>A (p.Arg1334Gln)

### NM_000251.2(MSH2):c.1662−1G>A

### NM_000535.6(PMS2):c.1882C>T (p.Arg628Ter)

### NM_000535.6(PMS2):c.2174+1G>A

### NM_000535.6(PMS2):c.2404C>T (p.Arg802Ter)

### NM_000179.2(MSH6):c.3991C>T (p.Arg1331Ter)

### NM_000179.2(MSH6):c.2503C>T (p.Gln835Ter)

### NM_000179.2(MSH6):c.718C>T (p.Arg240Ter)

### NM_000249.3(MLH1):c.1038G>A (p.Gln346=)

### NM_000249.3(MLH1):c.245C>T (p.Thr82Ile)

### NM_000249.3(MLH1):c.83C>T (p.Pro28Leu)

### NM_000249.3(MLH1):c.884G>A (p.Ser295Asn)

### NM_000249.3(MLH1):c.982C>T (p.Gln328Ter)

### NM_000251.2(MSH2):c.1046C>T (p.Pro349Leu)

### NM_000251.2(MSH2):c.1120C>T (p.Gln374Ter)

### NM_000251.2(MSH2):c.1285C>T (p.Gln429Ter)

### NM_000251.2(MSH2):c.1477C>T (p.Gln493Ter)

### NM_000251.2(MSH2):c.2152C>T (p.Gln718Ter)

### NM_000535.6(PMS2):c.703C>T (p.Gln235Ter)

### NM_000249.3(MLH1):c.2141G>A (p.Trp714Ter)

### NM_000251.2(MSH2):c.1009C>T (p.Gln337Ter)

### NM_000251.2(MSH2):c.1216C>T (p.Arg406Ter)

### NM_000179.2(MSH6):c.3202C>T (p.Arg1068Ter)

### NM_000251.2(MSH2):c.1165C>T (p.Arg389Ter)

### NM_000249.3(MLH1):c.1943C>T (p.Pro648Leu)

### NM_000249.3(MLH1):c.200G>A (p.Gly67Glu)

### NM_000249.3(MLH1):c.793C>T (p.Arg265Cys)

### NM_000249.3(MLH1):c.2059C>T (p.Arg687Trp)

### NM_000249.3(MLH1):c.677G>A (p.Arg226Gln)

### NM_000249.3(MLH1):c.2041G>A (p.Ala681Thr)

### NM_000249.3(MLH1):c.1942C>T (p.Pro648Ser)

### NM_000249.3(MLH1):c.676C>T (p.Arg226Ter)

### NM_000251.2(MSH2):c.2038C>T (p.Arg680Ter)

### NM_000179.2(MSH6):c.1483C>T (p.Arg495Ter)

### NM_000179.2(MSH6):c.2194C>T (p.Arg732Ter)

### NM_000179.2(MSH6):c.3103C>T (p.Arg1035Ter)

### NM_000179.2(MSH6):c.892C>T (p.Arg298Ter)

### NM_000249.3(MLH1):c.1459C>T (p.Arg487Ter)

### NM_000249.3(MLH1):c.1731G>A (p.Ser577=)

### NM_000249.3(MLH1):c.184C>T (p.Gln62Ter)

### NM_000249.3(MLH1):c.1975C>T (p.Arg659Ter)

### NM_000249.3(MLH1):c.199G>A (p.Gly67Arg)

### NM_000251.2(MSH2):c.1076+1G>A

### NM_000251.2(MSH2):c.1147C>T (p.Arg383Ter)

### NM_000251.2(MSH2):c.181C>T (p.Gln61Ter)

### NM_000251.2(MSH2):c.212−1G>A

### NM_000251.2(MSH2):c.2131C>T (p.Arg711Ter)

### NM_000535.6(PMS2):c.697C>T (p.Gln233Ter)

### NM_000535.6(PMS2):c.1261C>T (p.Arg421Ter)

### NM_000251.2(MSH2):c.2047G>A (p.Gly683Arg)

### NM_000535.6(PMS2):c.400C>T (p.Arg134Ter)

### NM_000535.6(PMS2):c.1927C>T (p.Gln643Ter)

### NM_000179.2(MSH6):c.1444C>T (p.Arg482Ter)

### NM_000179.2(MSH6):c.2731C>T (p.Arg911Ter)

### NM_000535.6(PMS2):c.943C>T (p.Arg315Ter)

[1308] See Table A. Accordingly, an aspect of the invention relates to a method for treating or preventing Lynch syndrome by correcting one or more pathogenic G-to-A or C-to-T mutations/SNPs, particularly one or more pathogenic G-to-A or C-to-T mutations/SNPs present in at least one gene selected from BCKDHA, BCKDHB, DBT, and DLD, and more particularly one or more pathogenic G-to-A or C-to-T mutations/SNPs described above.

### Other Genetic Diseases

[1309] Pathogenic G-to-A or C-to-T mutations/SNPs associated with additional genetic diseases are also reported in the ClinVar database and disclosed in Table A, including but not limited to Marfan syndrome, Hurler syndrome, Glycogen Storage Disease, and Cystic Fibrosis. Accordingly, an aspect of the invention relates to a method for correcting one or more pathogenic G-to-A or C-to-T mutations/SNPs associated with any of these diseases, as discussed below.

### Marfan Syndrome

[1310] In some embodiments, the methods, systems, and compositions described herein are used to correct one or more pathogenic G-to-A or C-to-T mutations/SNPs associated with Marfan syndrome. In some embodiment, the pathogenic mutations/SNPs are present in at least the FBN1 gene, including at least the followings:

### NM_000138.4(FBN1):c.1879C>T (p.Arg627Cys)

### NM_000138.4(FBN1):c.1051C>T (p.Gln351Ter)

### NM_000138.4(FBN1):c.184C>T (p.Arg62Cys)

### NM_000138.4(FBN1):c.2855−1G>A

### NM_000138.4(FBN1):c.3164G>A (p.Cys1055Tyr)

### NM_000138.4(FBN1):c.368G>A (p.Cys123Tyr)

### NM_000138.4(FBN1):c.4955G>A (p.Cys1652Tyr)

### NM_000138.4(FBN1):c.7180C>T (p.Arg2394Ter)

### NM_000138.4(FBN1):c.8267G>A (p.Trp2756Ter)

### NM_000138.4(FBN1):c.1496G>A (p.Cys499Tyr)

### NM_000138.4(FBN1):c.6886C>T (p.Gln2296Ter)

### NM_000138.4(FBN1):c.3373C>T (p.Arg1125Ter)

### NM_000138.4(FBN1):c.640G>A (p.Gly214Ser)

### NM_000138.4(FBN1):c.5038C>T (p.Gln1680Ter)

### NM_000138.4(FBN1):c.434G>A (p.Cys145Tyr)

### NM_000138.4(FBN1):c.2563C>T (p.Gln855Ter)

### NM_000138.4(FBN1):c.7466G>A (p.Cys2489Tyr)

### NM_000138.4(FBN1):c.2089C>T (p.Gln697Ter)

### NM_000138.4(FBN1):c.592C>T (p.Gln198Ter)

### NM_000138.4(FBN1):c.6695G>A (p.Cys2232Tyr)

### NM_000138.4(FBN1):c.6164−1G>A

### NM_000138.4(FBN1):c.5627G>A (p.Cys1876Tyr)

### NM_000138.4(FBN1):c.4061G>A (p.Trp1354Ter)

### NM_000138.4(FBN1):c.1982G>A (p.Cys661Tyr)

### NM_000138.4(FBN1):c.6784C>T (p.Gln2262Ter)

### NM_000138.4(FBN1):c.409C>T (p.Gln137Ter)

### NM_000138.4(FBN1):c.364C>T (p.Arg122Cys)

### NM_000138.4(FBN1):c.3217G>A (p.Glu1073Lys)

### NM_000138.4(FBN1):c.4460−8G>A

### NM_000138.4(FBN1):c.4786C>T (p.Arg1596Ter)

### NM_000138.4(FBN1):c.7806G>A (p.Trp2602Ter)

### NM_000138.4(FBN1):c.247+1G>A

### NM_000138.4(FBN1):c.2495G>A (p.Cys832Tyr)

### NM_000138.4(FBN1):c.493C>T (p.Arg165Ter)

### NM_000138.4(FBN1):c.5504G>A (p.Cys1835Tyr)

### NM_000138.4(FBN1):c.5863C>T (p.Gln1955Ter)

### NM_000138.4(FBN1):c.6658C>T (p.Arg2220Ter)

### NM_000138.4(FBN1):c.7606G>A (p.Gly2536Arg)

### NM_000138.4(FBN1):c.7955G>A (p.Cys2652Tyr)

### NM_000138.4(FBN1):c.3037G>A (p.Gly1013Arg)

### NM_000138.4(FBN1):c.8080C>T (p.Arg2694Ter)

### NM_000138.4(FBN1):c.1633C>T (p.Arg545Cys)

### NM_000138.4(FBN1):c.7205−1G>A

### NM_000138.4(FBN1):c.4621C>T (p.Arg1541Ter)

### NM_000138.4(FBN1):c.1090C>T (p.Arg364Ter)

### NM_000138.4(FBN1):c.1585C>T (p.Arg529Ter)

### NM_000138.4(FBN1):c.4781G>A (p.Gly1594Asp)

### NM_000138.4(FBN1):c.643C>T (p.Arg215Ter)

### NM_000138.4(FBN1):c.3668G>A (p.Cys1223Tyr)

### NM_000138.4(FBN1):c.8326C>T (p.Arg2776Ter)

### NM_000138.4(FBN1):c.6354C>T (p.Ile2118=)

### NM_000138.4(FBN1):c.1468+5G>A

### NM_000138.4(FBN1):c.1546C>T (p.Arg516Ter)

### NM_000138.4(FBN1):c.4615C>T (p.Arg1539Ter)

### NM_000138.4(FBN1):c.5368C>T (p.Arg1790Ter)

### NM_000138.4(FBN1):c.1285C>T (p.Arg429Ter)

[1311] See Table A. Accordingly, an aspect of the invention relates to a method for treating or preventing Marfan syndrome by correcting one or more pathogenic G-to-A or C-to-T mutations/SNPs, particularly one or more pathogenic G-to-A or C-to-T mutations/SNPs present in the FBN1 gene, and more particularly one or more pathogenic G-to-A or C-to-T mutations/SNPs described above.

### Hurler Syndrome

[1312] In some embodiments, the methods, systems, and compositions described herein are used to correct one or more pathogenic G-to-A or C-to-T mutations/SNPs associated with Hurler syndrome. In some embodiment, the pathogenic mutations/SNPs are present in at least the IDUA gene, including at least the followings:

### NM_000203.4(IDUA):c.972+1G>A

### NM_000203.4(IDUA):c.1855C>T (p.Arg619Ter)

### NM_000203.4(IDUA):c.152G>A (p.Gly51Asp)

### NM_000203.4(IDUA):c.1205G>A (p.Trp402Ter)

### NM_000203.4(IDUA):c.208C>T (p.Gln70Ter)

### NM_000203.4(IDUA):c.1045G>A (p.Asp349Asn)

### NM_000203.4(IDUA):c.1650+5G>A

[1313] See Table A. Accordingly, an aspect of the invention relates to a method for treating or preventing Hurler syndrome by correcting one or more pathogenic G-to-A or C-to-T mutations/SNPs, particularly one or more pathogenic G-to-A or C-to-T mutations/SNPs present in the IDUA gene, and more particularly one or more pathogenic G-to-A or C-to-T mutations/SNPs described above.

### Glycogen Storage Disease

[1314] In some embodiments, the methods, systems, and compositions described herein are used to correct one or more pathogenic G-to-A or C-to-T mutations/SNPs associated with Glycogen Storage Disease. In some embodiment, the pathogenic mutations/SNPs are present in at least one gene selected from GAA, AGL, PHKB, PRKAG2, G6PC, PGAM2, GBE1, PYGM, and PFKM, including at least the followings:

### NM_000152.4(GAA):c.1927G>A (p.Gly643Arg)

### NM_000152.4(GAA):c.2173C>T (p.Arg725Trp)

### NM_000642.2(AGL):c.3980G>A (p.Trp1327Ter)

### NM_000642.2(AGL):c.16C>T (p.Gln6Ter)

### NM_000642.2(AGL):c.2039G>A (p.Trp680Ter)

### NM_000293.2(PHKB):c.1546C>T (p.Gln516Ter)

### NM_016203.3(PRKAG2):c.1592G>A (p.Arg531Gln)

### NM_000151.3(G6PC):c.248G>A (p.Arg83His)

### NM_000151.3(G6PC):c.724C>T (p.Gln242Ter)

### NM_000151.3(G6PC):c.883C>T (p.Arg295Cys)

### NM_000151.3(G6PC):c.247C>T (p.Arg83Cys)

### NM_000151.3(G6PC):c.1039C>T (p.Gln347Ter)

### NM_000152.4(GAA):c.1561G>A (p.Glu521Lys)

### NM_000642.2(AGL):c.2590C>T (p.Arg864Ter)

### NM_000642.2(AGL):c.3682C>T (p.Arg1228Ter)

### NM_000642.2(AGL):c.118C>T (p.Gln40Ter)

### NM_000642.2(AGL):c.256C>T (p.Gln86Ter)

### NM_000642.2(AGL):c.2681+1G>A

### NM_000642.2(AGL):c.2158−1G>A

### NM_000290.3(PGAM2):c.233G>A (p.Trp78Ter)

### NM_000152.4(GAA):c.1548G>A (p.Trp516Ter)

### NM_000152.4(GAA):c.2014C>T (p.Arg672Trp)

### NM_000152.4(GAA):c.546G>A (p.Thr182=)

### NM_000152.4(GAA):c.1802C>T (p.Ser601Leu)

### NM_000152.4(GAA):c.1754+1G>A

### NM_000152.4(GAA):c.1082C>T (p.Pro361Leu)

### NM_000152.4(GAA):c.2560C>T (p.Arg854Ter)

### NM_000152.4(GAA):c.655G>A (p.Gly219Arg)

### NM_000152.4(GAA):c.1933G>A (p.Asp645Asn)

### NM_000152.4(GAA):c.1979G>A (p.Arg660His)

### NM_000152.4(GAA):c.1465G>A (p.Asp489Asn)

### NM_000152.4(GAA):c.2512C>T (p.Gln838Ter)

### NM_000158.3(GBE1):c.1543C>T (p.Arg515Cys)

### NM_005609.3(PYGM):c.1726C>T (p.Arg576Ter)

### NM_005609.3(PYGM):c.1827G>A (p.Lys609=)

### NM_005609.3(PYGM):c.148C>T (p.Arg50Ter)

### NM_005609.3(PYGM):c.613G>A (p.Gly205Ser)

### NM_005609.3(PYGM):c.1366G>A (p.Val456Met)

### NM_005609.3(PYGM):c.1768+1G>A

### NM_001166686.1(PFKM):c.450+1G>A

[1315] See Table A. Accordingly, an aspect of the invention relates to a method for treating or preventing Glycogen Storage Disease by correcting one or more pathogenic G-to-A or C-to-T mutations/SNPs, particularly one or more pathogenic G-to-A or C-to-T mutations/SNPs present in at least one gene selected from GAA, AGL, PHKB, PRKAG2, G6PC, PGAM2, GBE1, PYGM, and PFKM, and more particularly one or more pathogenic G-to-A or C-to-T mutations/SNPs described above.

### Cystic Fibrosis

[1316] In some embodiments, the methods, systems, and compositions described herein are used to correct one or more pathogenic G-to-A or C-to-T mutations/SNPs associated with Cystic Fibrosis. In some embodiment, the pathogenic mutations/SNPs are present in the CFTR gene, including at least the followings:

### NM_000492.3(CFTR):c.3712C>T (p.Gln1238Ter)

### NM_000492.3(CFTR):c.3484C>T (p.Arg1162Ter)

### NM_000492.3(CFTR):c.1766+1G>A

### NM_000492.3(CFTR):c.1477C>T (p.Gln493Ter)

### NM_000492.3(CFTR):c.2538G>A (p.Trp846Ter)

### NM_000492.3(CFTR):c.2551C>T (p.Arg851Ter)

### NM_000492.3(CFTR):c.3472C>T (p.Arg1158Ter)

### NM_000492.3(CFTR):c.1475C>T (p.Ser492Phe)

### NM_000492.3(CFTR):c.1679G>A (p.Arg560Lys)

### NM_000492.3(CFTR):c.3197G>A (p.Arg1066His)

### NM_000492.3(CFTR):c.3873+1G>A

### NM_000492.3(CFTR):c.3196C>T (p.Arg1066Cys)

### NM_000492.3(CFTR):c.2490+1G>A

### NM_000492.3(CFTR):c.3718−1G>A

### NM_000492.3(CFTR):c.171G>A (p.Trp57Ter)

### NM_000492.3(CFTR):c.3937C>T (p.Gln1313Ter)

### NM_000492.3(CFTR):c.274G>A (p.Glu92Lys)

### NM_000492.3(CFTR):c.1013C>T (p.Thr338Ile)

### NM_000492.3(CFTR):c.3266G>A (p.Trp1089Ter)

### NM_000492.3(CFTR):c.1055G>A (p.Arg352Gln)

### NM_000492.3(CFTR):c.1654C>T (p.Gln552Ter)

### NM_000492.3(CFTR):c.2668C>T (p.Gln890Ter)

### NM_000492.3(CFTR):c.3611G>A (p.Trp1204Ter)

### NM_000492.3(CFTR):c.1585−8G>A

### NM_000492.3(CFTR):c.223C>T (p.Arg75Ter)

### NM_000492.3(CFTR):c.1680−1G>A

### NM_000492.3(CFTR):c.349C>T (p.Arg117Cys)

### NM_000492.3(CFTR):c.1203G>A (p.Trp401Ter)

### NM_000492.3(CFTR):c.1240C>T (p.Gln414Ter)

### NM_000492.3(CFTR):c.1202G>A (p.Trp401Ter)

### NM_000492.3(CFTR):c.1209+1G>A

### NM_000492.3(CFTR):c.115C>T (p.Gln39Ter)

### NM_000492.3(CFTR):c.1116+1G>A

### NM_000492.3(CFTR):c.1393−1G>A

### NM_000492.3(CFTR):c.1573C>T (p.Gln525Ter)

### NM_000492.3(CFTR):c.164+1G>A

### NM_000492.3(CFTR):c.166G>A (p.Glu56Lys)

### NM_000492.3(CFTR):c.170G>A (p.Trp57Ter)

### NM_000492.3(CFTR):c.2053C>T (p.Gln685Ter)

### NM_000492.3(CFTR):c.2125C>T (p.Arg709Ter)

### NM_000492.3(CFTR):c.2290C>T (p.Arg764Ter)

### NM_000492.3(CFTR):c.2353C>T (p.Arg785Ter)

### NM_000492.3(CFTR):c.2374C>T (p.Arg792Ter)

### NM_000492.3(CFTR):c.2537G>A (p.Trp846Ter)

### NM_000492.3(CFTR):c.292C>T (p.Gln98Ter)

### NM_000492.3(CFTR):c.2989−1G>A

### NM_000492.3(CFTR):c.3293G>A (p.Trp1098Ter)

### NM_000492.3(CFTR):c.4144C>T (p.Gln1382Ter)

### NM_000492.3(CFTR):c.4231C>T (p.Gln1411Ter)

### NM_000492.3(CFTR):c.4234C>T (p.Gln1412Ter)

### NM_000492.3(CFTR):c.579+5G>A

### NM_000492.3(CFTR):c.595C>T (p.His199Tyr)

### NM_000492.3(CFTR):c.613C>T (p.Pro205Ser)

### NM_000492.3(CFTR):c.658C>T (p.Gln220Ter)

### NM_000492.3(CFTR):c.1117−1G>A

### NM_000492.3(CFTR):c.3294G>A (p.Trp1098Ter)

### NM_000492.3(CFTR):c.1865G>A (p.Gly622Asp)

### NM_000492.3(CFTR):c.743+1G>A

### NM_000492.3(CFTR):c.1679+1G>A

### NM_000492.3(CFTR):c.1657C>T (p.Arg553Ter)

### NM_000492.3(CFTR):c.1675G>A (p.Ala559Thr)

### NM_000492.3(CFTR):c.165−1G>A

### NM_000492.3(CFTR):c.200C>T (p.Pro67Leu)

### NM_000492.3(CFTR):c.2834C>T (p.Ser945Leu)

### NM_000492.3(CFTR):c.3846G>A (p.Trp1282Ter)

### NM_000492.3(CFTR):c.1652G>A (p.Gly551Asp)

### NM_000492.3(CFTR):c.4426C>T (p.Gln1476Ter)

### NM_000492.3:c.3718-2477C>T

### NM_000492.3(CFTR):c.2988+1G>A

### NM_000492.3(CFTR):c.2657+5G>A

### NM_000492.3(CFTR):c.2988G>A (p.Gln996=)

### NM_000492.3(CFTR):c.274−1G>A

### NM_000492.3(CFTR):c.3612G>A (p.Trp1204Ter)

### NM_000492.3(CFTR):c.1646G>A (p.Ser549Asn)

### NM_000492.3(CFTR):c.3752G>A (p.Ser1251Asn)

### NM_000492.3(CFTR):c.4046G>A (p.Gly1349Asp)

### NM_000492.3(CFTR):c.532G>A (p.Gly178Arg)

### NM_000492.3(CFTR):c.3731G>A (p.Gly1244Glu)

### NM_000492.3(CFTR):c.1651G>A (p.Gly551Ser)

### NM_000492.3(CFTR):c.1585−1G>A

### NM_000492.3(CFTR):c.1000C>T (p.Arg334Trp)

### NM_000492.3(CFTR):c.254G>A (p.Gly85Glu)

### NM_000492.3(CFTR):c.1040G>A (p.Arg347His)

### NM_000492.3(CFTR):c.273+1G>A

[1317] See Table A. Accordingly, an aspect of the invention relates to a method for treating or preventing Cystic Fibrosis by correcting one or more pathogenic G-to-A or C-to-T mutations/SNPs, particularly one or more pathogenic G-to-A or C-to-T mutations/SNPs present in the CFTR gene, and more particularly one or more pathogenic G-to-A or C-to-T mutations/SNPs described above.

[1318] In some embodiments, the methods, systems, and compositions described herein are used to correct a pathogenic A-to-G (A>G) mutation or SNP believed to be associated with familial 2 breast-ovarian cancer, wherein the pathogenic A>G mutation or SNP is located in the BRCA2 gene (HGVS: U43746.1:n.7829+1G>A). Accordingly, an additional aspect of the invention relates to a method for treating or preventing familial 2 breast-ovarian cancer by correcting the aforementioned pathogenic A>G mutation or SNP.

[1319] In some embodiments, the methods, systems, and compositions described herein are used to correct a pathogenic A-to-G (A>G) mutation or SNP believed to be associated with hereditary factor IX deficiency, wherein the pathogenic A>G mutation or SNP is located at GRCh38: ChrX: 139537145 in the F9 gene, which results in an Arg to Gln substitution. Accordingly, an additional aspect of the invention relates to a method for treating or preventing hereditary factor IX deficiency by correcting the aforementioned pathogenic A>G mutation or SNP.

[1320] In some embodiments, the methods, systems, and compositions described herein are used to correct a pathogenic A-to-G (A>G) mutation or SNP believed to be associated with beta-plus-thalassemia, beta thalassemia, and beta thalassemia major, wherein the pathogenic A>G mutation or SNP is located at GRCh38: Chr11: 5226820 in the HBB gene. Accordingly, an additional aspect of the invention relates to a method for treating or preventing with beta-plus-thalassemia, beta thalassemia, and beta thalassemia major by correcting the aforementioned pathogenic A>G mutation or SNP.

[1321] In some embodiments, the methods, systems, and compositions described herein are used to correct a pathogenic A-to-G (A>G) mutation or SNP believed to be associated with Marfan syndrome, wherein the pathogenic A>G mutation or SNP is located in the FBN1 gene (IVS2DS, G-A, +1), as reported by Yamamoto et al. J Hum Genet. 2000; 45(2):115-8. Accordingly, an additional aspect of the invention relates to a method for treating or preventing Marfan syndrome by correcting the aforementioned pathogenic A>G mutation or SNP.

[1322] In some embodiments, the methods, systems, and compositions described herein are used to correct a pathogenic A-to-G (A>G) mutation or SNP believed to be associated with Wiskott-Aldrich syndrome, wherein the pathogenic A>G mutation or SNP is located at position −1 of intro 6 of the WAS gene (IVS6AS, G-A, −1), as reported by Kwan et al. (1995). Accordingly, an additional aspect of the invention relates to a method for treating or preventing Wiskott-Aldrich syndrome by correcting the aforementioned pathogenic A>G mutation or SNP.

[1323] In some embodiments, the methods, systems, and compositions described herein are used to correct a pathogenic A-to-G (A>G) mutation or SNP believed to be associated with cystic fibrosis, wherein the pathogenic A>G mutation or SNP is located at GRCh38: Chr7:117590440 in the CFTR gene. Accordingly, an additional aspect of the invention relates to a method for treating or preventing cystic fibrosis by correcting the aforementioned pathogenic A>G mutation or SNP.

[1324] In some embodiments, the methods, systems, and compositions described herein are used to correct a pathogenic A-to-G (A>G) mutation or SNP believed to be associated with cystic fibrosis and hereditary pancreatitis, wherein the pathogenic A>G mutation or SNP is located GRCh38: Chr7:117606754 in the CFTR gene. Accordingly, an additional aspect of the invention relates to a method for treating or preventing cystic fibrosis and hereditary pancreatitis by correcting the aforementioned pathogenic A>G mutation or SNP.

[1325] In some embodiments, the methods, systems, and compositions described herein are used to correct a pathogenic A-to-G (A>G) mutation or SNP believed to be associated with cystic fibrosis, wherein the pathogenic A>G mutation or SNP is located at GRCh38: Chr7: 117587738 in the CFTR gene. Accordingly, an additional aspect of the invention relates to a method for treating or preventing cystic fibrosis by correcting the aforementioned pathogenic A>G mutation or SNP.

[1326] In some embodiments, the methods, systems, and compositions described herein are used to correct a pathogenic A-to-G (A>G) mutation or SNP believed to be associated with Turcot syndrome and Lynch syndrome, wherein the pathogenic A>G mutation or SNP is located at GRCh38: Chr2:47470964 in the MSH2 gene. Accordingly, an additional aspect of the invention relates to a method for treating or preventing Turcot syndrome and Lynch syndrome by correcting the aforementioned pathogenic A>G mutation or SNP.

[1327] In some embodiments, the methods, systems, and compositions described herein are used to correct a pathogenic A-to-G (A>G) mutation or SNP believed to be associated with cystic fibrosis, wherein the pathogenic A>G mutation or SNP is located at GRCh38: Chr7: 117642437 in the CFTR gene. Accordingly, an additional aspect of the invention relates to a method for treating or preventing cystic fibrosis by correcting the aforementioned pathogenic A>G mutation or SNP.

[1328] In some embodiments, the methods, systems, and compositions described herein are used to correct a pathogenic A-to-G (A>G) mutation or SNP believed to be associated with Lynch syndrome II and Lynch syndrome, wherein the pathogenic A>G mutation or SNP is located at GRCh38: Chr3:37001058 in the MLH1 gene. Accordingly, an additional aspect of the invention relates to a method for treating or preventing Lynch syndrome II and Lynch syndrome by correcting the aforementioned pathogenic A>G mutation or SNP.

[1329] In some embodiments, the methods, systems, and compositions described herein are used to correct a pathogenic A-to-G (A>G) mutation or SNP believed to be associated with cystic fibrosis, wherein the pathogenic A>G mutation or SNP is located at GRCh38: Chr7: 117642594 in the CFTR gene. Accordingly, an additional aspect of the invention relates to a method for treating or preventing cystic fibrosis by correcting the aforementioned pathogenic A>G mutation or SNP.

[1330] In some embodiments, the methods, systems, and compositions described herein are used to correct a pathogenic A-to-G (A>G) mutation or SNP believed to be associated with cystic fibrosis, wherein the pathogenic A>G mutation or SNP is located at GRCh38: Chr7: 117592658 in the CFTR gene. Accordingly, an additional aspect of the invention relates to a method for treating or preventing cystic fibrosis by correcting the aforementioned pathogenic A>G mutation or SNP.

[1331] In some embodiments, the methods, systems, and compositions described herein are used to correct a pathogenic A-to-G (A>G) mutation or SNP believed to be associated with familial 1 breast-ovarian cancer, hereditary breast and ovarian cancer syndrome, and hereditary cancer-predisposing syndrome, wherein the pathogenic A>G mutation or SNP is located at GRCh38: Chr17:43057051 in the BRCA1 gene. Accordingly, an additional aspect of the invention relates to a method for treating or preventing familial 1 breast-ovarian cancer, hereditary breast and ovarian cancer syndrome, and hereditary cancer-predisposing syndrome by correcting the aforementioned pathogenic A>G mutation or SNP.

[1332] In some embodiments, the methods, systems, and compositions described herein are used to correct a pathogenic A-to-G (A>G) mutation or SNP believed to be associated with dihydropyrimidine dehydrogenase deficiency, Hirschsprung disease 1, fluorouracil response, pyrimidine analogues response—toxicity/ADR, capecitabine response—toxicity/ADR, fluorouracil response—toxicity/ADR, tegafur response—toxicity/ADR, wherein the pathogenic A>G mutation or SNP is located at GRCh38: Chr1:97450058 in the DPYD gene. Accordingly, an additional aspect of the invention relates to a method for treating or preventing dihydropyrimidine dehydrogenase deficiency, Hirschsprung disease 1, fluorouracil response, pyrimidine analogues response—toxicity/ADR, capecitabine response—toxicity/ADR, fluorouracil response—toxicity/ADR, tegafur response—toxicity/ADR by correcting the aforementioned pathogenic A>G mutation or SNP.

[1333] In some embodiments, the methods, systems, and compositions described herein are used to correct a pathogenic A-to-G (A>G) mutation or SNP believed to be associated with Lynch syndrome, wherein the pathogenic A>G mutation or SNP is located at GRCh38: Chr2:47478520 in the MSH2 gene. Accordingly, an additional aspect of the invention relates to a method for treating or preventing the Lynch syndrome by correcting the aforementioned pathogenic A>G mutation or SNP.

[1334] In some embodiments, the methods, systems, and compositions described herein are used to correct a pathogenic A-to-G (A>G) mutation or SNP believed to be associated with Lynch syndrome, wherein the pathogenic A>G mutation or SNP is located at GRCh38: Chr3:37011819 in the MLH1 gene. Accordingly, an additional aspect of the invention relates to a method for treating or preventing the Lynch syndrome by correcting the aforementioned pathogenic A>G mutation or SNP.

[1335] In some embodiments, the methods, systems, and compositions described herein are used to correct a pathogenic A-to-G (A>G) mutation or SNP believed to be associated with Lynch syndrome, wherein the pathogenic A>G mutation or SNP is located at GRCh38: Chr3: 37014545 in the MLH1 gene. Accordingly, an additional aspect of the invention relates to a method for treating or preventing the Lynch syndrome by correcting the aforementioned pathogenic A>G mutation or SNP.

[1336] In some embodiments, the methods, systems, and compositions described herein are used to correct a pathogenic A-to-G (A>G) mutation or SNP believed to be associated with Lynch syndrome, wherein the pathogenic A>G mutation or SNP is located at GRCh38: Chr3: 37011867 in the MLH1 gene. Accordingly, an additional aspect of the invention relates to a method for treating or preventing the Lynch syndrome by correcting the aforementioned pathogenic A>G mutation or SNP.

[1337] In some embodiments, the methods, systems, and compositions described herein are used to correct a pathogenic A-to-G (A>G) mutation or SNP believed to be associated with Lynch syndrome, wherein the pathogenic A>G mutation or SNP is located at GRCh38: Chr3: 37025636 in the MLH1 gene. Accordingly, an additional aspect of the invention relates to a method for treating or preventing the Lynch syndrome by correcting the aforementioned pathogenic A>G mutation or SNP.

[1338] In some embodiments, the methods, systems, and compositions described herein are used to correct a pathogenic A-to-G (A>G) mutation or SNP believed to be associated with Lynch syndrome, wherein the pathogenic A>G mutation or SNP is located at GRCh38: Chr3: 37004475 in the MLH1 gene. Accordingly, an additional aspect of the invention relates to a method for treating or preventing the Lynch syndrome by correcting the aforementioned pathogenic A>G mutation or SNP.

[1339] In some embodiments, the methods, systems, and compositions described herein are used to correct a pathogenic A-to-G (A>G) mutation or SNP believed to be associated with Lynch syndrome and hereditary cancer-predisposing syndrome, wherein the pathogenic A>G mutation or SNP is located at GRCh38: Chr2:47416430 in the MSH2 gene. Accordingly, an additional aspect of the invention relates to a method for treating or preventing Lynch syndrome and hereditary cancer-predisposing syndrome by correcting the aforementioned pathogenic A>G mutation or SNP.

[1340] In some embodiments, the methods, systems, and compositions described herein are used to correct a pathogenic A-to-G (A>G) mutation or SNP believed to be associated with Lynch syndrome and hereditary cancer-predisposing syndrome, wherein the pathogenic A>G mutation or SNP is located at GRCh38: Chr2: 47408400 in the MSH2 gene. Accordingly, an additional aspect of the invention relates to a method for treating or preventing Lynch syndrome and hereditary cancer-predisposing syndrome by correcting the aforementioned pathogenic A>G mutation or SNP.

[1341] In some embodiments, the methods, systems, and compositions described herein are used to correct a pathogenic A-to-G (A>G) mutation or SNP believed to be associated with Lynch syndrome and hereditary cancer-predisposing syndrome, wherein the pathogenic A>G mutation or SNP is located at GRCh38: Chr3:36996710 in the MLH1 gene. Accordingly, an additional aspect of the invention relates to a method for treating or preventing Lynch syndrome and hereditary cancer-predisposing syndrome by correcting the aforementioned pathogenic A>G mutation or SNP.

[1342] In some embodiments, the methods, systems, and compositions described herein are used to correct a pathogenic A-to-G (A>G) mutation or SNP believed to be associated with familial 1 breast-ovarian cancer, wherein the pathogenic A>G mutation or SNP is located at GRCh38: Chr17:43067696 in the BRCA1 gene. Accordingly, an additional aspect of the invention relates to a method for treating or preventing familial 1 breast-ovarian cancer by correcting the aforementioned pathogenic A>G mutation or SNP.

[1343] In some embodiments, the methods, systems, and compositions described herein are used to correct a pathogenic A-to-G (A>G) mutation or SNP believed to be associated with familial 2 breast-ovarian cancer and hereditary breast and ovarian cancer syndrome, wherein the pathogenic A>G mutation or SNP is located at GRCh38: Chr13:32356610 in the BRCA2 gene. Accordingly, an additional aspect of the invention relates to a method for treating or preventing familial 2 breast-ovarian cancer and hereditary breast and ovarian cancer syndrome by correcting the aforementioned pathogenic A>G mutation or SNP.

[1344] In some embodiments, the methods, systems, and compositions described herein are used to correct a pathogenic A-to-G (A>G) mutation or SNP believed to be associated with primary dilated cardiomyopathy and primary familial hypertrophic cardiomyopathy, wherein the pathogenic A>G mutation or SNP is located at GRCh38: Chr14:23419993 in the MYH7 gene. Accordingly, an additional aspect of the invention relates to a method for treating or preventing primary dilated cardiomyopathy and primary familial hypertrophic cardiomyopathy by correcting the aforementioned pathogenic A>G mutation or SNP.

[1345] In some embodiments, the methods, systems, and compositions described herein are used to correct a pathogenic A-to-G (A>G) mutation or SNP believed to be associated with primary familial hypertrophic cardiomyopathy, camptocormism, and hypertrophic cardiomyopathy, wherein the pathogenic A>G mutation or SNP is located at GRCh38: Chr14:23415225 in the MYH7 gene. Accordingly, an additional aspect of the invention relates to a method for treating or preventing primary familial hypertrophic cardiomyopathy, camptocormism, and hypertrophic cardiomyopathy by correcting the aforementioned pathogenic A>G mutation or SNP.

[1346] In some embodiments, the methods, systems, and compositions described herein are used to correct a pathogenic A-to-G (A>G) mutation or SNP believed to be associated with familial cancer of breast, familial 2 breast-ovarian cancer, hereditary breast and ovarian cancer syndrome, and hereditary cancer-predisposing syndrome, wherein the pathogenic A>G mutation or SNP is located at GRCh38: Chr13:32357741 in the BRCA2 gene. Accordingly, an additional aspect of the invention relates to a method for treating or preventing the familial cancer of breast, familial 2 breast-ovarian cancer, hereditary breast and ovarian cancer syndrome, and hereditary cancer-predisposing syndrome by correcting the aforementioned pathogenic A>G mutation or SNP.

[1347] In some embodiments, the methods, systems, and compositions described herein are used to correct a pathogenic A-to-G (A>G) mutation or SNP believed to be associated with primary dilated cardiomyopathy, hypertrophic cardiomyopathy, cardiomyopathy, and left ventricular noncompaction, wherein the pathogenic A>G mutation or SNP is located at GRCh38: Chr14:23431584 in the MYH7 gene. Accordingly, an additional aspect of the invention relates to a method for treating or preventing primary dilated cardiomyopathy, hypertrophic cardiomyopathy, cardiomyopathy, and left ventricular noncompaction by correcting the aforementioned pathogenic A>G mutation or SNP.

[1348] In some embodiments, the methods, systems, and compositions described herein are used to correct a pathogenic A-to-G (A>G) mutation or SNP believed to be associated with familial 1 breast-ovarian cancer, hereditary breast and ovarian cancer syndrome, and hereditary cancer-predisposing syndrome, wherein the pathogenic A>G mutation or SNP is located at GRCh38: Chr17:43067607 in the BRCA1 gene. Accordingly, an additional aspect of the invention relates to a method for treating or preventing familial 1 breast-ovarian cancer, hereditary breast and ovarian cancer syndrome, and hereditary cancer-predisposing syndrome by correcting the aforementioned pathogenic A>G mutation or SNP.

[1349] In some embodiments, the methods, systems, and compositions described herein are used to correct a pathogenic A-to-G (A>G) mutation or SNP believed to be associated with familial 1 breast-ovarian cancer, hereditary breast and ovarian cancer syndrome, hereditary cancer-predisposing syndrome, and breast cancer, wherein the pathogenic A>G mutation or SNP is located at GRCh38: Chr17:43047666 in the BRCA1 gene. Accordingly, an additional aspect of the invention relates to a method for treating or preventing familial 1 breast-ovarian cancer, hereditary breast and ovarian cancer syndrome, hereditary cancer-predisposing syndrome, and breast cancer by correcting the aforementioned pathogenic A>G mutation or SNP.

[1350] In some embodiments, the methods, systems, and compositions described herein are used to correct a pathogenic A-to-G (A>G) mutation or SNP believed to be associated with familial 2 breast-ovarian cancer, hereditary breast and ovarian cancer syndrome, and hereditary cancer-predisposing syndrome, wherein the pathogenic A>G mutation or SNP is located at GRCh38: Chr13:32370558 in the BRCA2 gene. Accordingly, an additional aspect of the invention relates to a method for treating or preventing familial 2 breast-ovarian cancer, hereditary breast and ovarian cancer syndrome, and hereditary cancer-predisposing syndrome by correcting the aforementioned pathogenic A>G mutation or SNP.

[1351] In some embodiments, the methods, systems, and compositions described herein are used to correct a pathogenic A-to-G (A>G) mutation or SNP believed to be associated with familial 1 breast-ovarian cancer, hereditary breast and ovarian cancer syndrome, hereditary cancer-predisposing syndrome, and breast cancer, wherein the pathogenic A>G mutation or SNP is located at GRCh38: Chr17:43074330 in the BRCA1 gene. Accordingly, an additional aspect of the invention relates to a method for treating or preventing familial 1 breast-ovarian cancer, hereditary breast and ovarian cancer syndrome, hereditary cancer-predisposing syndrome, and breast cancer by correcting the aforementioned pathogenic A>G mutation or SNP.

[1352] In some embodiments, the methods, systems, and compositions described herein are used to correct a pathogenic A-to-G (A>G) mutation or SNP believed to be associated with familial 1 breast-ovarian cancer, hereditary breast and ovarian cancer syndrome, and hereditary cancer-predisposing syndrome, wherein the pathogenic A>G mutation or SNP is located at GRCh38: Chr17: 43082403 in the BRCA1 gene. Accordingly, an additional aspect of the invention relates to a method for treating or preventing familial 1 breast-ovarian cancer, hereditary breast and ovarian cancer syndrome, and hereditary cancer-predisposing syndrome by correcting the aforementioned pathogenic A>G mutation or SNP.

[1353] In some embodiments, the methods, systems, and compositions described herein are used to correct a pathogenic C-to-T (C>T) mutation or SNP believed to be associated with cystic fibrosis and hereditary pancreatitis, wherein the pathogenic C>T mutation or SNP is located at GRCh38: Chr7:117639961 in the CFTR gene. Accordingly, an additional aspect of the invention relates to a method for treating or preventing the cystic fibrosis and hereditary pancreatitis by correcting the aforementioned pathogenic C>T mutation or SNP.

[1354] In some embodiments, the methods, systems, and compositions described herein are used to correct a pathogenic C-to-T (C>T) mutation or SNP believed to be associated with familial 2 breast-ovarian cancer, wherein the pathogenic C>T mutation or SNP is located at GRCh38: Chr13:32336492 in the BRCA2 gene. Accordingly, an additional aspect of the invention relates to a method for treating or preventing the familial 2 breast-ovarian cancer by correcting the aforementioned pathogenic C>T mutation or SNP.

[1355] In some embodiments, the methods, systems, and compositions described herein are used to correct a pathogenic C-to-T (C>T) mutation or SNP believed to be associated with familial 1 breast-ovarian cancer, wherein the pathogenic C>T mutation or SNP is located at GRCh38: Chr17:43063365 in the BRCA1 gene. Accordingly, an additional aspect of the invention relates to a method for treating or preventing the familial 1 breast-ovarian cancer by correcting the aforementioned pathogenic C>T mutation or SNP.

[1356] In some embodiments, the methods, systems, and compositions described herein are used to correct a pathogenic C-to-T (C>T) mutation or SNP believed to be associated with familial 1 breast-ovarian cancer, wherein the pathogenic C>T mutation or SNP is located at GRCh38: Chr17:43093613 in the BRCA1 gene. Accordingly, an additional aspect of the invention relates to a method for treating or preventing the familial 1 breast-ovarian cancer by correcting the aforementioned pathogenic C>T mutation or SNP.

[1357] In some embodiments, the methods, systems, and compositions described herein are used to correct a pathogenic C-to-T (C>T) mutation or SNP believed to be associated with familial cancer of breast, and familial 1 breast-ovarian cancer, wherein the pathogenic C>T mutation or SNP is located at at GRCh38: Chr17:43093931 of the BRCA1 gene. Accordingly, an additional aspect of the invention relates to a method for treating or preventing familial cancer of breast, and familial 1 breast-ovarian cancer by correcting the aforementioned pathogenic C>T mutation or SNP.

[1358] In some embodiments, the methods, systems, and compositions described herein are used to correct a pathogenic C-to-T (C>T) mutation or SNP believed to be associated with familial hypertrophic cardiomyopathy 1, primary familial hypertrophic cardiomyopathy, and hypertrophic cardiomyopathy, wherein the pathogenic C>T mutation or SNP is located at GRCh38: Chr14:23429279 of the MYH7 gene. Accordingly, an additional aspect of the invention relates to a method for treating or preventing familial hypertrophic cardiomyopathy 1, primary familial hypertrophic cardiomyopathy, and hypertrophic cardiomyopathy by correcting the aforementioned pathogenic C>T mutation or SNP.

[1359] In some embodiments, the methods, systems, and compositions described herein are used to correct a pathogenic C-to-T (C>T) mutation or SNP believed to be associated with familial 2 breast-ovarian cancer, hereditary breast and ovarian cancer syndrome, and hereditary cancer-predisposing syndrome, wherein the pathogenic C>T mutation or SNP is located at GRCh38: Chr13:32356472 of the BRCA2 gene. Accordingly, an additional aspect of the invention relates to a method for treating or preventing familial 2 breast-ovarian cancer, hereditary breast and ovarian cancer syndrome, and hereditary cancer-predisposing syndrome by correcting the aforementioned pathogenic C>T mutation or SNP.

[1360] In some embodiments, the methods, systems, and compositions described herein are used to correct a pathogenic C-to-T (C>T) mutation or SNP believed to be associated with familial hypertrophic cardiomyopathy 1, primary familial hypertrophic cardiomyopathy, familial restrictive cardiomyopathy, and hypertrophic cardiomyopathy, wherein the pathogenic C>T mutation or SNP is located at GRCh38: Chr14:23429005 in the MYH7 gene. Accordingly, an additional aspect of the invention relates to a method for treating or preventing familial hypertrophic cardiomyopathy 1, primary familial hypertrophic cardiomyopathy, familial restrictive cardiomyopathy, and hypertrophic cardiomyopathy by correcting the aforementioned pathogenic C>T mutation or SNP.

[1361] Additional pathogenic A>G mutations and SNPs are found in the ClinVar database Accordingly, an additional aspect of the present disclosure relates to correction of a pathogenic A>G mutation or SNP listed in ClinVar using the methods, systems, and compositions described herein to treat or prevent a disease or condition associated therewith.

[1362] Additional pathogenic C>T mutations and SNPs are also found in the ClinVar database. Accordingly, an additional aspect of the present disclosure relates to correction of a pathogenic C>T mutation or SNP listed in ClinVar using the methods, systems, and compositions described herein to treat or prevent a disease or condition associated therewith. Other T mutations or SNPS that may be addressed using the embodiments disclosed herein are listed in a table found in the ASCII text filed entitled “Clin_var_pathogenic_SNPS_TC_txt” filed herewith.

### Modification of Phosphorylation Sites and Other Post-Translational Modifications

[1363] The present invention also contemplates use of the AD-functionalized CRISPR system described herein to modify phosphorylation sites and other post-translational modifications (PTMs). The AD-functionalized CRISPR system described herein can edit residues associated with post-translational modifications (FIGS. 140A and 140B). Protein phosphorylations are involved in multiple cellular processes and are relatively easy to target (Humprey et al. Trends Endocrinol Metab 2015, 26(12):676-687). Current technologies to target phosphorylations sites or other PTMs include whole protein knockdown or knockout, base editing, and small molecule. These methods, however, all have certain drawbacks. Protein target knockdown or knockout will remove whole protein instead of just the PTMs, base editing is permanent, whereas small molecules are also hard to develop and may have unknown targets. Using the AD-functionalized CRISPR system described herein to remove phosphorylations site may allow study of the function of phosphorylations, for example, it can be used for screening kinase targets to determine relative contributions to phenotype, or for transcriptome-wide screening for potential small molecules. Targeting PTMs using AD-functionalized CRISPR system can also have therapeutic potential in cancer, inflammation, metabolism, and differentiation.

[1364] In certain embodiments, the AD-functionalized CRISPR system described herein can be used to target Stat3 and/or IRF-5 phosphorylation to reduce inflammation. The target sites can be selected from the group consisting of Stat3 Tyr705, IRF-5 Thr10, Ser158, Ser309, Ser317, Ser451 and Ser462, all of which are involved in interleukin signaling and/or autoimmunity (Sadreev et al. PLOS One 2014, 9(10): e110913). Accordingly, an additional aspect of the invention relates to a method for treating or preventing autoimmune disease by targeting the aforementioned phosphorylation sites.

[1365] In certain embodiments, the AD-functionalized CRISPR system described herein can be used to target Insulin receptor substrate (IRS) phosphorylation. The target sites can be selected from the group consisting of Ser-265, Ser-302, Ser-325, Ser-336, Ser-358, Ser-407, and Ser-408 of IRS-1. The phosphorylation of these sites reduces insulin sensitivity (Copps and White Diabetologia 2012, October; 55(10):2565-2582), and reducing inhibitory serine phosphorylation at these sites can rescue insulin sensitivity. Accordingly, an additional aspect of the invention relates to a method for treating or preventing diabetes by targeting the aforementioned phosphorylation sites.

### Making Hypomorphic Mutations

[1366] In certain embodiments, the AD-functionalized CRISPR system described herein can be used to make hypomorphic mutations. Engineering hypomorphic mutations can lead to significant downregulation of essential genes without lethality, which allows for straightforward creation of models for diseases that involve hypomorphic mutations and decreasing levels of certain proteins in a fine-tuned manner for therapeutic applications. PolyA track insertion is an existing technology to create hypomorphic mutants. Using the AD-functionalized CRISPR system for introducing hypomorphic mutations is minimally disruptive, precise, and can be fine-tuned.

[1367] In certain embodiments, the AD-functionalized CRISPR system can be used for targeted editing of immune checkpoint proteins. Immune checkpoint blockade is used in cancer therapy to enhance anti-tumor immunity by promoting T-cell activation and proliferation, which includes anti-CTLA4 and anti-PD-1 therapies (Byun et al., Nat Reviews Endocrinology 2017). Using the AD-functionalized CRISPR system can improve efficacy over existing CTLA-4, PD-1/PD-L1 inhibitor therapies. The AD-functionalized CRISPR system can also be employed to inhibit other suppressive immune checkpoints (such as TIM-3, KIRs, and LAG-3) and to introduce hypomorphic mutations to immune activating checkpoints such as 4-IBB and GITR. In particular embodiments, the AD-functionalized CRISPR system can be used for targeted editing of CTLA-4/B7-1 interaction surface ⁹⁹MYPPPY¹⁰⁴ stem loop (Stamper et. al., Nature 2001, Mar. 29; 410(6828):608-11), for example, the C-to-U editing can convert proline to serine or leucine, whereas the A-to-I editing can convert tyrosine to cysteine and methionine to valine. In particular embodiments, the AD-functionalized CRISPR system can be used for targeted editing of CTLA-4/B7-2 interface at E33, R35, T53, and E97 (Schwartz et. al., Nature 2001, Mar. 29; 410(6828):604-8; Peach et. al., Cell (1994)), for example, the C-to-U editing can convert arginine to cysteine, stop codon, or tryptophan, whereas the A-to-I editing can convert glutamic acid to glycine, and arginine to glycine. Accordingly, an additional aspect of the invention relates to a method for treating or preventing cancer by editing the aforementioned residues involved in immune checkpoint protein interactions.

### Modulating Protein Stability

[1368] In certain embodiments, the AD-functionalized CRISPR system described herein can be used to modulate protein stability. In particular embodiments, the AD-functionalized CRISPR system can be used for general degron targeting. A degron is a portion of a protein that is important in regulation of protein degradation rates. Known degrons include short amino acid sequences, structural motifs and exposed amino acids (often Lysine or Arginine) located anywhere in the protein. Some proteins can contain multiple degrons. While there are many types of different degrons, and a high degree of variability even within these groups, degrons are all similar for their involvement in regulating the rate of a protein degradation and can be categorized as “Ubiquitin-dependent” or “Ubiquitin-independent”.

[1369] In certain example embodiments, the AD-functionalized CRISPR system can be used for targeted editing of the degron present in SMN2, a protein involved in spinal muscular atrophy (SMA). SMA is caused by homozygous survival of motor neurons 1(SMN1) gene deletions, leaving a duplicate gene, SMN2, as the sole source of SMN protein. SMA disease severity correlates to the amount of functional protein. For example, severe SMA (type I) patients typically have one or two SMN2 copies, intermediate severity SMA (type II) patients usually have three SMN2 copies, and patients with mild SMA (type III) mostly have three or four SMN2 copies. Most of the mRNA produced from SMN2 pre-mRNA is exon 7-skipped (about 80%), resulting in a highly unstable and almost undetectable protein (SMNDelta7). This splicing defect creates a degradation signal (degron; SMNDelta7-DEG) at SMNDelta7's C-terminal 15 amino acids. The S270A mutation inactivates SMNDelta7-DEG, generating a stable SMNDelta7 that rescues viability of SMN-deleted cells. (Cho and Dreyfuss, Genes and Dev., 2010, Mar. 1; 24(5):438-42). The AD-functionalized CRISPR system can be used for targeted editing of S270, thereby disrupts the degron present in SMN2. Accordingly, an additional aspect of the invention relates to a method for treating or preventing SMA by editing the aforementioned residues involved in regulating SMN stability.

[1370] In certain embodiments, the AD-functionalized CRISPR system can be used for disrupting the D-box degrons, resulting in the conversion of Arg to Gly, or Leu to The. In other embodiments, the AD-functionalized CRISPR system can be used for disrupting the KEN-box degrons, resulting in the conversion of Lys to Arg/Glu, Glu to Gly, or Asn to Ser/Asp.

[1371] The N-degrons were first characterized in yeast to the PEST sequence of mouse ornithine decarboxylase. A PEST sequence is a peptide sequence that is rich in proline (P), glutamic acid (E), serine (S), and threonine (T). This sequence is associated with proteins that have a short intracellular half-life; hence, it is hypothesized that the PEST sequence acts as a signal peptide for protein degradation. The AD-functionalized CRISPR system can be used for targeted editing of the PEST sequence, hence regulating protein stability. In particular example embodiments, the AD-functionalized CRISPR system can be used for targeting the PEST sequence or a regulated, ubiquitin-independent degron in IxBa (Fortmann et al, JMB Molecular Bio 2015, Aug. 28; 427(17): 2748-2756). In particular embodiments, the AD-functionalized CRISPR system can be used for editing a PEST sequence in NANOG to promote embryonic stem cell (ESC) pluripotency. In particular embodiments, the AD-functionalized CRISPR system can be used for editing a PEST sequence in Cdc25A phosphatase. In other embodiments, the AD-functionalized CRISPR system can also be employed to facilitate protein degradation, for example, by mutating the residues to enhance the degree of degradation or by mutating the N-terminal methionine.

### Targeting Ion Channels for Therapy

[1372] In certain embodiments, the AD-functionalized CRISPR system described herein can be used to target ion channels. Ions regulate many physiological processes, including heart contractility, nervous system signal transduction, and control of pulmonary vasculature pressure. Small molecules that affect ion channels, such as Digoxin and Lidocaine are widely used in clinical medicine. These small molecules, however, have toxicity issues and only act on shorter time scales whereas the diseases being treated such as heart failure or arrhythmias, are often chronic. Knockdown approach is also not desirable as it may affect other biological roles played by the ion channels.

[1373] In certain embodiments, the AD-functionalized CRISPR system can be used to make stop codons to block ion channels. In certain embodiments, the AD-functionalized CRISPR system can be used to make stop codons to skip exons. The ion channels can be sodium or potassium ion channels. In particular embodiments, the AD-functionalized CRISPR system can be used to make mutations selected from the group consisting of V36I, F216S, S241T, R277X, Y328X, N395K, S459X, E693X, I767X, R830X, I848T, L858H, L858H, L858F, A863P, W897X, R996C, F1200LfsX33, I1235LfsX2, V1298F, V1298D, V1299F, F1449V, c.4336-7_10delGTTTX, I1461T, F1462V, T1464I, R1488X, M1267K, K1659X, W1689X in the sodium-channel subunit Nav1.7 (Drenth and Waxman, J C I, 2007, December; 117(12):3603-9). In certain embodiments, the AD-functionalized CRISPR system can be used to edit RNA in neurons. The resulting ion channel activity change can be assessed via patch-clamping and pain sensitivity can be examined using existing mouse models (Gao et al., J Neurosci. 2009 Apr. 1; 29(13):4096-108). Accordingly, an additional aspect of the invention relates to a method for treating or preventing heart failure or arrhythmia by editing the aforementioned residues involved in ion channel activities.

### TGFbeta Modulation to Prevent Cardiac Remodeling

[1374] In certain embodiments, the AD-functionalized CRISPR system can be used to modulate TGFbeta signaling to prevent cardiac remodeling. After myocardial infarction, TGFbeta signaling promotes cardiac fibrosis and cardiomyocyte apoptosis and blocks the inflammatory response that can heal the cardiac tissue. Therefore negative heart remodeling can be prevented by blocking TGFbeta signaling. The type II TGFbeta receptor requires autophosphorylation at Ser213 and Ser409 as well as Thr259, 336, and 424 for activity. The AD-functionalized CRISPR system can be used to mutate the serines to Leu or Phe, or tyrosines to Cys, which can prevent autophosphorylation and TGFbeta activation in fibroblasts and cardiomyocytes.

[1375] In certain embodiments, the AD-functionalized CRISPR system can be used to mutate the Smad transcription factors downstream of the TGFbeta receptor to prevent their activation via phosphorylation. The AD-functionalized CRISPR system can mutate the phosphorylation sites selected from the group consisting of Thr8, Thr179, Ser208, and Ser213 of Smad3 and Ser245, Ser250, Ser255, and Thr8 of Smad2. The AD-functionalized CRISPR system can be used to mutate the serines to Leu or Phe, or threonines to Ile or Met. Accordingly, an additional aspect of the invention relates to a method for preventing cardiac remodeling by editing the aforementioned residues involved in TGFbeta signaling.

### Other Applications

[1376] In certain embodiments, the AD-functionalized CRISPR system can be used in lineage tracing. In certain embodiments, the AD-functionalized CRISPR system can be used for sensing with REPAIR system. Different orthologs can be induced and editing can be focused on synthetic transcripts. In certain embodiments, the AD-functionalized CRISPR system can be used for saturation mutagenesis on specific proteins to identify functional domains. In certain embodiments, the AD-functionalized CRISPR system can be used to identify RNA binding protein interactions. The AD-functionalized CRISPR system can be used to map protein-protein binding interfaces. Saturation mutagenesis on be performed on one protein followed by FRET and cell sorting to determine which guide RNA disrupts protein-protein interactions.

[1377] In certain embodiments, the AD-functionalized CRISPR system can be used for transient inactivation or activation of proteins, generating heterozygous protective mutations, pre or pro-protein cleavage sites, generation of neoantigens, creating conditional fusion proteins, editing of poly-A signals, RNA targeting to introduce other epitranscriptomic modifications, for identification or modification of RNA binding protein sites, mapping RNA-RNA contacts, or editing co-localized RNPs.

[1378] In some embodiments, the AD-functionalized CRISPR system can be used for modification ubiquitination or acetylation sites, tissue regeneration, cell differentiation, creating motifs recognized by ubiquitin ligases, single cell barcoding, creating splice sites, or altering antigen receptors.

### WORKING EXAMPLES

### Example 1

[1379] Adenine deaminases (ADs) is capable of deaminating adenines at specific sites in double stranded RNA.

[1380] The facts that some ADs can effect adenine deamination on DNA-RNAn RNA duplexes (e.g. Zheng et al., Nucleic Acids Research 2017) presents a unique opportunity to develop an RNA guided AD by taking advantage of the RNA duplex formed between the guide RNA and its complementary DNA target in the R-loop formed during RNA-guided DNA binding by inactive Cas13. By using inactive Cas13 to recruit an AD, the AD enzyme will then act on the adenine in the RNA-DNAn RNA duplex.

[1381] In one embodiment, an inactive Cas13, such as Cas13b is obtained using the following mutations: R116A, H121A, R1177A and Hi182A. To increase the efficiency of editing by AD, a mutated ADAR is used such as the mutated hADAR2d comprising mutation E488Q.

### Designs for the Recruitment of AD to a Specific Locus:

[1382] 1. NLS-tagged inactive Cas13 is fused to AD on either the N- or C-terminal end. A variety of linkers are used including flexible linkers such as GSG5 or less flexible linkers such as LEPGEKPYKCPECGKSFSQSGALTRHQRTHTR (SEQ ID No. 11).

[1383] 2. The guide RNA scaffold is modified with aptamers such as MS2 binding sites (e.g. Konermann et al., Nature 2015). NLS-tagged AD-MS2 binding protein fusions is co-introduced into target cells along with (NLS-tagged inactive or Cas13b) and corresponding guide RNA.

[1384] 3. AD is inserted into an internal loop of NLS-tagged inactive or nickase Cas13.

### Designs for the RNA Guide:

[1385] 1. Guide sequences of a length corresponding to that of a natural guide sequence of the Cas13 protein are designed to target the RNA of interest.

[1386] 2. RNA guide with longer than canonical length is used to form RNA duplexes outside of the protein-guide RNA-target DNA complex.

[1387] For each of these RNA guide designs, the base on the RNA that is opposite of the adenine on the target RNA strand would be specified as a C as opposed to U.

### Choice and Designs of ADs:

[1388] A number of ADs are used, and each will have varying levels of activity. These ADs

[1389] 1. Human ADARs (hADAR1, hADAR2, hADAR3)

[1390] 2. Squid Octopus vulgaris ADARs

[1391] 3. Squid Sepia ADARS; Doryteusthis opalescens ADARS

[1392] ADATs (human ADAT, Drosophila ADAT)

[1393] Mutations can also be used to increase the activity of ADAR reacting against a DNA-RNAn RNA duplex. For example, for the human ADAR genes, the hADAR1d (E1008Q) or hADAR2d(E488Q) mutation is used to increase their activity against a DNA-RNA target.

[1394] Each ADAR has varying levels of sequence context requirement. For example, for hADAR1d (E1008Q), tAg and aAg sites are efficiently deaminated, whereas aAt and cAc are less efficiently edited, and gAa and gAc are even less edited. However, the context requirement will vary for different ADARs.

[1395] A schematic showing of one version of the system is provided in FIG. 1. The amino acid sequences of example AD proteins are provided in FIG. 4.

### Example 2

### Cluc/Gluc Tiling for Cas13a/Cas13b Interference

[1396] To compare knockdown efficiency between Cas13a and Cas13b, Cypridina and Gaussia luciferase genes were tiled with 24 or 96 guides, respectively (FIG. 10). Guides were matched for Cas13a and Cas13b, and show increased knockdown efficiency for Cas13b, with all but one guide for each gene showing higher efficiency for Cas13b.

### ADAR Editing Quantification by NGS

[1397] Cas13b-ADAR2 RNA editing efficiency was tested by designing a luciferase reporter with a premature stop codon UAG, which prevents expression of the luciferase (FIG. 11A). 7 guides of varying length were designed and positioned relative to the UAG stop codon that all contained a C mismatch to the A in the UAG. The C mismatch is known to create a bubble at the site of editing which is favored by the ADAR catalytic domain. RNA editing by Cas13b-ADAR2 would convert the UAG to a UIG (UGG), which introduces a tryptophan instead of the stop codon, and allows translation to proceed. Expression of the guides and Cas13b12-ADAR2 fusion in HEK293FT cells restored luciferase expression to varying levels with the greatest restoration occurring for guide 5 (FIG. 111B). In general, there is increasing levels of editing from guides 1-5 as the editing site is moved further away from the 3′ end of the crRNA where the direct repeat is and thus where the protein binds. This likely indicates that the part of the crRNA:target duplex that is bound by the protein is inaccessible to the ADAR catalytic domain. Guides 5, 6, and 7 show the greatest amount of activity because the editing site is on the far end of the guide away from the DR/protein binding area and because their guides are much longer, generating a longer RNA duplex that is favored by ADAR. ADAR activity is optimal when the editing site is in the middle of a RNA duplex. The relative expression of luciferase activity is normalized to the non-targeting guide condition.

[1398] These samples were sequenced to precisely quantitate the RNA editing efficiency (FIG. 11C). The editing efficiency is listed in parentheses next to the guide label. Overall, the percent editing identified by sequencing matched the relative levels of luciferase expression restoration seen in FIG. 11B. Guide 5 showed the most RNA editing with a rate of 45% conversion to G at the on-target A. In some instances, there is a small amount of off-target A-G editing in the region. These may be reduced by introducing G mismatches in the guide sequence, which are disfavored by the ADAR catalytic domain.

[1399] In addition to editing the luciferase reporter transcript, guides were designed to edit out-of-frame UAG sites in the KRAS and PPIB transcripts, with two guides targeting each transcript (FIG. 12). The guides were designed with the same principles as guide 5 above (a 45 nt spacer with the editing site 27 nt away from the 3′ DR and a C mismatch to the editing site adenosine). The KRAS guides were able to achieve 6.5% and 13.7% editing at the on-target adenosine and the PPIB guides were able to achieve 7.7% and 9.2% editing. There are also some off-targets present for some of these guides which can be reduced by designing G mismatches in the spacers against possible off-target adenosines that are nearby. It does seem that off-targets seem to happen with the duplex region 3′ of the target adenosine.

Cas13a/b+shRNA Specificity from RNA Seq

[1400] To determine the specificity of the Cas13b12 knockdown, RNA sequencing was performed on all mRNAs across the transcriptome (FIG. 13A). The knockdown of guides targeting Gluc and KRAS was compared against non-targeting guides and found that Cas13a2 and Cas13b12 had specific knockdown of the target transcript (red dot in FIG. 13A) while the shRNAs had many off-targets as evidenced by the greater variance in the distribution. The number of significant off-targets for each of these conditions is shown in FIG. 13B. Significant off-targets are measured by a t-test with FDR correction (p<0.01) for any off-target transcripts that are changed by greater than 2 fold or less than 0.8 fold. The Cas13a and Cas13b conditions had very few off targets compared to the hundreds of off-targets found for the shRNA conditions. The knockdown efficiency for each of the conditions is shown in FIG. 13C.

### Mismatch Specificity to Reduce Off Targets (A:a or A:G)

[1401] To reduce off targets at adenosines near the target adenosine editing site, guides were designed that have G or A mismatches to the potential off-target adenosines (FIG. 14 and Table below). Mismatches with G or A are not favored for activity by the ADAR catalytic domain.

| Name | Guide |
|---|---|
| Luciferase guide WT with C mismatch (SEQ | catagaatgttctaaaCCAtcctgcggcctctactctgc |
| ID No. 162) | attcaa |
| Luciferase guide WT with C mismatch with 1 | catagaatgttcGaaaCCAtcctgcggcctctactctg |
| G MM (SEQ ID No. 163) | cattcaa |
| Luciferase guide WT with C mismatch with 2 | catagaatgGtcGaaaCCAtcctgcggcctctactct |
| G MM (SEQ ID No. 164) | gcattcaa |
| Luciferase guide WT with C mismatch with 1 | catagaatgttcAaaaCCAtcctgcggcctctactctg |
| G MM (SEQ ID No. 165) | cattcaa |
| Luciferase guide WT with C mismatch with 2 | catagaatgAtcAaaaCCAtcctgcggcctctactct |
| G MM (SEQ ID No. 166) | gcattcaa |
| KRAS guide WT with Cmismatch (SEQ ID | ggtttctccatcaattacCacttgcttcctgtaggaatcct |
| No. 167) | ctatt |
| KRAS guide with C mismatch with 1 G MM | ggtttctccatcaatGacCacttgcttcctgtaggaatcc |
| (SEQ ID No. 168) | tctatt |
| KRAS guide with C mismatch with 2 G MM | ggtttctccatcaaGGacCacttgctcctgtaggaatc |
| (SEQ ID No. 169) | ctctatt |
| KRAS guide with C mismatch with 1 A MM | ggtttctccatcaatAacCacttgcttcctgtaggaatcc |
| (SEQ ID No. 170) | tctatt |
| KRAS guide with C mismatch with 2 A MM | ggtttctccatcaaAAacCacttgcttcctgtaggaatc |
| (SEQ ID No. 171) | ctctatt |
| PPIB guide WT with C mismatch (SEQ ID | gcctttctctcctgtagcCaaggccacaaaattatccact |
| No. 172) | gttttt |
| PPIB guide WT with C mismatch with 1 G | gcctttctctcctgGagcCaaggccacaaaattatccac |
| MM (SEQ ID No. 173) | tgttttt |
| PPIB guide WT with C mismatch with 1 A | gcctttctctcctgAagcCaaggccacaaaattatccac |
| MM (SEQ ID No. 174) | tgttttt |

[1402] The guides in the Table above were designed to have a C mismatch against the on-target adenosine to be edited and G or A mismatches against known off-target sites (based off of the RNA sequencing from above). Mismatches in the spacer sequence are capitalized.

### Mismatch for On-Target Activity

[1403] Prior research on the catalytic domain of ADAR2 has demonstrated that different bases opposite the target A can influence the amount of inosine editing (Zheng et al. (2017), Nucleic Acid Research, 45(6):3369-3377). Specifically, U and C are found opposite natural ADAR-edited A's, whereas G and A are not. To test whether or not A and G mismatches with the edited A can be used to suppress ADAR activity a guide known to be active with a C mismatch is tested with all other 3 possible bases on the luciferase reporter assay (FIG. 16). Relative activities are quantified by assessing luciferase activity. Guide sequences are provided in the Table below.

| Mismatch | Guide sequence |
|---|---|
| Mismatch-C (SEQ ID No. 175) | GcatagaatgttctaaaCCAtcctgcggcctctactct |
| | gcattcaa |
| Mismatch-G (SEQ ID No. 176) | GcatagaatgttctaaaCGAtcctgcggcctctactct |
| | gcattcaa |
| Mismatch-T (SEQ ID No. 177) | GcatagaatgttctaaaCTAtcctgcggcctctactct |
| | gcattcaa |
| Mismatch-A (SEQ ID No. 178) | GcatagaatgttctaaaCAAtcctgcggcctctactct |
| | gcattcaa |

### Improvement of Editing and Reduction of Off-Target Modification by Chemical Modification of 2RNAs

[1404] gRNAs which are chemically modified as exemplified in Vogel et al. (2014), Angew Chem Int Ed, 53:6267-6271, doi:10.1002/anie.201402634) to reduce off-target activity and to improve on-target efficiency. 2′-O-methyl and phosphothioate modified guide RNAs in general improve editing efficiency in cells.

### Motif Preference

[1405] ADAR has been known to demonstrate a preference for neighboring nucleotides on either side of the edited A (www.nature.com/nsmb/journal/v23/n5/full/nsmb.3203.html, Matthews et al. (2017), Nature Structural Mol Biol, 23(5): 426-433). The preference is systematically tested by targeting Cypridina luciferase transcripts with variable bases surrounding the targeted A (FIG. 17).

### Larger Bubbles to Enhance RNA Editing Efficiency

[1406] To enhance RNA editing efficiency on non-preferred 5′ or 3′ neighboring bases, intentional mismatches in neighboring bases are introduced, which has been demonstrated in vitro to allow for editing of non-preferred motifs (https://academic.oup.com/nar/article-lookup/doi/10.1093/nar/gku272; Schneider et al (2014), Nucleic Acid Res, 42(10):e87); Fukuda et al. (2017), Scienticic Reports, 7, doi:10.1038/srep41478). Additional mismatches are tested, such as guanosine substitutions, to see if they reduce natural preferences (FIG. 18).

Editing of multiple A's in a transcript

[1407] Results suggest that As opposite Cs in the targeting window of the ADAR deaminase domain are preferentially edited over other bases. Additionally, As base-paired with Us within a few bases of the targeted base show low levels of editing by Cas13b-ADAR fusions, suggesting that there is flexibility for the enzyme to edit multiple As (FIG. 19). These two observations suggest that multiple As in the activity window of Cas13b-ADAR fusions could be specified for editing by mismatching all As to be edited with Cs. To test this the most promising guides from the optimization experiment are taken and multiple A:C mismatches in the activity window are designed to test the possibility of creating multiple A:I edits. The editing rates for this experiment is be quanitifed using NGS. To suppress potential off-target editing in the activity window, non-target As are paired with As or Gs (depending on the results from the base preference experiment).

### Guide Length Titration for RNA Editing

[1408] ADAR naturally works on inter- or intra-molecular RNA duplexes of >20 bp in length (see also Nishikura et al. (2010), Annu Rev Biochem, 79:321-349). The results demonstrated that longer crRNAs, resulting in longer duplexes, had higher levels of activity. To systematically compare the activity of guides of different lengths for RNA editing activity we have designed guides of 30, 50, 70 and 84 bases to correct the stop codon in our luciferase reporter assay (FIG. 20 and Table below). We have designed these guides such that the position of the edited A is present at all possible even distances within the mRNA:crRNA duplex with respect to the 3′ end of the specificity determining region of the crRNA (i.e. +2, +4 etc.).

| Sequence Name | Sequence |
|---|---|
| Guide_Cas13bC-luc_30_ADAROTop(SEQ ID No. 179) | GCATCCTGCGGCCTCTACTCTGCATT |
| | CAATT |
| Guide_Cas13bC- | GACCATCCTGCGGCCTCTACTCTGC |
| luc_30 ADAR1Top(SEQ ID No. 180) | ATTCAA |
| Guide_Cas13bC- | GAAACCATCCTGCGGCCTCTACTCT |
| luc_30_ADAR2Top(SEQ ID No. 181) | GCATTC |
| Guide_Cas13bC- | GCTAAACCATCCTGCGGCCTCTACT |
| luc_30_ADAR3Top(SEQ ID No. 182) | CTGCAT |
| Guide_Cas13bC- | GTTCTAAACCATCCTGCGGCCTCTA |
| luc_30_ADAR4Top(SEQ ID No. 183) | CTCTGC |
| Guide_Cas13bC- | GTGTTCTAAACCATCCTGCGGCCTC |
| luc_30_ADAR5Top(SEQ ID No. 184) | TACTCT |
| Guide_Cas13bC- | GAATGTTCTAAACCATCCTGCGGCC |
| luc_30_ADAR6Top(SEQ ID No. 185) | TCTACT |
| Guide_Cas13bC- | GAGAATGTTCTAAACCATCCTGCGG |
| luc_30_ADAR7Top(SEQ ID No. 186) | CCTCTA |
| Guide _Cas13bC- | GATAGAATGTTCTAAACCATCCTGC |
| luc_30_ADAR8Top(SEQ ID No. 187) | GGCCTC |
| Guide_Cas13bC- | GCCATAGAATGTTCTAAACCATCCT |
| luc_30_ADAR9Top(SEQ ID No. 188) | GCGGCC |
| Guide_Cas13bC- | GTTCCATAGAATGTTCTAAACCATC |
| luc_30_ADAR10Top(SEQ ID No. 189) | CTGCGG |
| Guide_Cas13bC- | GCTTTCCATAGAATGTTCTAAACCA |
| luc_30_ADAR11Top(SEQ ID No. 190) | TCCTGC |
| Guide_Cas13bC- | GCTCTTTCCATAGAATGTTCTAAAC |
| luc_30_ADAR12Top(SEQ ID No. 191) | CATCCT |
| Guide_Cas13bC- | GATCTCTTTCCATAGAATGTTCTAA |
| luc_30_ADAR13Top(SEQ ID No. 192) | ACCATC |
| Guide_Cas13bC- | GGAATCTCTTTCCATAGAATGTTCT |
| luc_30_ADAR14Top(SEQ ID No. 193) | AAACCA |
| Guide_Cas13bC- | GCATCCTGCGGCCTCTACTCTGCATT |
| luc_50_ADAROTop(SEQ ID No. 194) | CAATTACATACTGACACATTCGGCA |
| Guide_Cas13bC- | GACCATCCTGCGGCCTCTACTCTGC |
| luc_50_ADAR1Top(SEQ ID No. 195) | ATTCAATTACATACTGACACATTCG |
| | G |
| Guide_Cas13bC- | GAAACCATCCTGCGGCCTCTACTCT |
| luc_50_ADAR2Top(SEQ ID No. 196) | GCATTCAATTACATACTGACACATT |
| | C |
| Guide_Cas13bC- | GCTAAACCATCCTGCGGCCTCTACT |
| luc_50_ADAR3Top(SEQ ID No. 197) | CTGCATTCAATTACATACTGACACA |
| | T |
| Guide_Cas13bC- | GTTCTAAACCATCCTGCGGCCTCTA |
| luc_50_ADAR4Top(SEQ ID No. 198) | CTCTGCATTCAATTACATACTGACA |
| | C |
| Guide_Cas13bC- | GTGTTCTAAACCATCCTGCGGCCTC |
| luc_50_ADAR5Top(SEQ ID No. 199) | TACTCTGCATTCAATTACATACTGA |
| | C |
| Guide_Cas13bC- | GAATGTTCTAAACCATCCTGCGGCC |
| luc_50_ADAR6Top(SEQ ID No. 200) | TCTACTCTGCATTCAATTACATACTG |
| Guide_Cas13bC- | GAGAATGTTCTAAACCATCCTGCGG |
| luc_50_ADAR7Top(SEQ ID No. 201) | CCTCTACTCTGCATTCAATTACATAC |
| Guide_Cas13bC- | GATAGAATGTTCTAAACCATCCTGC |
| luc_50_ADAR8Top(SEQ ID No. 202) | GGCCTCTACTCTGCATTCAATTACAT |
| Guide_Cas13bC- | GCCATAGAATGTTCTAAACCATCCT |
| luc_50_ADAR9Top(SEQ ID No. 203) | GCGGCCTCTACTCTGCATTCAATTA |
| | C |
| Guide_Cas13bC- | GTTCCATAGAATGTTCTAAACCATC |
| luc_50_ADAR10Top(SEQ ID No. 204) | CTGCGGCCTCTACTCTGCATTCAATT |
| Guide_Cas13bC- | GCTTTCCATAGAATGTTCTAAACCA |
| luc_50_ADAR11Top(SEQ ID No. 205) | TCCTGCGGCCTCTACTCTGCATTCAA |
| Guide_Cas13bC- | GCTCTTTCCATAGAATGTTCTAAAC |
| luc_50_ADAR12Top(SEQ ID No. 206) | CATCCTGCGGCCTCTACTCTGCATTC |
| Guide_Cas13bC- | GATCTCTTTCCATAGAATGTTCTAA |
| luc_50_ADAR13Top(SEQ ID No. 207) | ACCATCCTGCGGCCTCTACTCTGCA |
| | T |
| Guide_Cas13bC- | GGAATCTCTTTCCATAGAATGTTCT |
| luc_50_ADAR14Top(SEQ ID No. 208) | AAACCATCCTGCGGCCTCTACTCTG |
| | C |
| Guide_Cas13bC- | GTGGAATCTCTTTCCATAGAATGTT |
| luc_50_ADAR15Top(SEQ ID No. 209) | CTAAACCATCCTGCGGCCTCTACTC |
| | T |
| Guide_Cas13bC- | GACTGGAATCTCTTTCCATAGAATG |
| luc_50_ADAR16Top(SEQ ID No. 210) | TTCTAAACCATCCTGCGGCCTCTACT |
| Guide_Cas13bC- | GGAACTGGAATCTCTTTCCATAGAA |
| luc_50_ADAR17Top(SEQ ID No. 211) | TGTTCTAAACCATCCTGCGGCCTCT |
| | A |
| Guide_Cas13bC- | GTGGAACTGGAATCTCTTTCCATAG |
| luc_50_ADAR18Top(SEQ ID No. 212) | AATGTTCTAAACCATCCTGCGGCCT |
| | C |
| Guide_Cas13bC- | GCCTGGAACTGGAATCTCTTTCCAT |
| luc_50_ADAR19Top(SEQ ID No. 213) | AGAATGTTCTAAACCATCCTGCGGC |
| | C |
| Guide_Cas13bC- | GTTCCTGGAACTGGAATCTCTTTCC |
| luc_50_ADAR20Top(SEQ ID No. 214) | ATAGAATGTTCTAAACCATCCTGCG |
| | G |
| Guide_Cas13bC- | GGGTTCCTGGAACTGGAATCTCTTT |
| luc_50_ADAR21Top(SEQ ID No. 215) | CCATAGAATGTTCTAAACCATCCTG |
| | C |
| Guide_Cas13bC- | GCAGGTTCCTGGAACTGGAATCTCT |
| luc_50_ADAR22Top(SEQ ID No. 216) | TTCCATAGAATGTTCTAAACCATCC |
| | T |
| Guide_Cas13bC- | GACCAGGTTCCTGGAACTGGAATCT |
| luc_50_ADAR23Top(SEQ ID No. 217) | CTTTCCATAGAATGTTCTAAACCAT |
| | C |
| Guide_Cas13bC- | GGTACCAGGTTCCTGGAACTGGAAT |
| luc_50_ADAR24Top(SEQ ID No. 218) | CTCTTTCCATAGAATGTTCTAAACC |
| | A |
| Guide_Cas13bC- | GCATCCTGCGGCCTCTACTCTGCATT |
| luc_70_ADAROTop(SEQ ID No. 219) | CAATTACATACTGACACATTCGGCA |
| | ACATGTTTTTCCTGGTTTAT |
| Guide_Cas13bC- | GACCATCCTGCGGCCTCTACTCTGC |
| luc_70_ADAR1Top(SEQ ID No. 220) | ATTCAATTACATACTGACACATTCG |
| | GCAACATGTTTTTCCTGGTTT |
| Guide_Cas13bC- | GAAACCATCCTGCGGCCTCTACTCT |
| luc_70_ADAR2Top(SEQ ID No. 221) | GCATTCAATTACATACTGACACATT |
| | CGGCAACATGTTTTTCCTGGT |
| Guide_Cas13bC- | GCTAAACCATCCTGCGGCCTCTACT |
| luc_70_ADAR3Top(SEQ ID No. 222) | CTGCATTCAATTACATACTGACACA |
| | TTCGGCAACATGTTTTTCCTG |
| Guide_Cas13bC- | GTTCTAAACCATCCTGCGGCCTCTA |
| luc_70_ADAR4Top(SEQ ID No. 223) | CTCTGCATTCAATTACATACTGACA |
| | CATTCGGCAACATGTTTTTCC |
| Guide_Cas13bC- | GTGTTCTAAACCATCCTGCGGCCTC |
| luc_70_ADAR5Top(SEQ ID No. 224) | TACTCTGCATTCAATTACATACTGA |
| | CACATTCGGCAACATGTTTTT |
| Guide_Cas13bC- | GAATGTTCTAAACCATCCTGCGGCC |
| luc_70_ADAR6Top(SEQ ID No. 225) | TCTACTCTGCATTCAATTACATACTG |
| | ACACATTCGGCAACATGTTT |
| Guide_Cas13bC- | GAGAATGTTCTAAACCATCCTGCGG |
| luc_70_ADAR7Top(SEQ ID No. 226) | CCTCTACTCTGCATTCAATTACATAC |
| | TGACACATTCGGCAACATGT |
| Guide_Cas13bC- | GATAGAATGTTCTAAACCATCCTGC |
| luc_70_ADAR8Top(SEQ ID No. 227) | GGCCTCTACTCTGCATTCAATTACAT |
| | ACTGACACATTCGGCAACAT |
| Guide_Cas13bC- | GCCATAGAATGTTCTAAACCATCCT |
| luc_70_ADAR9Top(SEQ ID No. 228) | GCGGCCTCTACTCTGCATTCAATTA |
| | CATACTGACACATTCGGCAAC |
| Guide_Cas13bC- | GTTCCATAGAATGTTCTAAACCATC |
| luc_70_ADAR10Top(SEQ ID No. 229) | CTGCGGCCTCTACTCTGCATTCAATT |
| | ACATACTGACACATTCGGCA |
| Guide_Cas13bC- | GCTTTCCATAGAATGTTCTAAACCA |
| luc_70_ADAR11Top(SEQ ID No. 230) | TCCTGCGGCCTCTACTCTGCATTCAA |
| | TTACATACTGACACATTCGG |
| Guide_Cas13bC- | GCTCTTTCCATAGAATGTTCTAAAC |
| luc_70_ADAR12Top(SEQ ID No. 231) | CATCCTGCGGCCTCTACTCTGCATTC |
| | AATTACATACTGACACATTC |
| Guide_Cas13bC- | GATCTCTTTCCATAGAATGTTCTAA |
| luc_70_ADAR13Top(SEQ ID No. 232) | ACCATCCTGCGGCCTCTACTCTGCA |
| | TTCAATTACATACTGACACAT |
| Guide_Cas13bC- | GGAATCTCTTTCCATAGAATGTTCT |
| luc_70_ADAR14Top(SEQ ID No. 233) | AAACCATCCTGCGGCCTCTACTCTG |
| | CATTCAATTACATACTGACAC |
| Guide_Cas13bC- | GTGGAATCTCTTTCCATAGAATGTT |
| luc_70_ADAR15Top(SEQ ID No. 234) | CTAAACCATCCTGCGGCCTCTACTC |
| | TGCATTCAATTACATACTGAC |
| Guide_Cas13bC- | GACTGGAATCTCTTTCCATAGAATG |
| luc_70_ADAR16Top(SEQ ID No. 235) | TTCTAAACCATCCTGCGGCCTCTACT |
| | CTGCATTCAATTACATACTG |
| Guide_Cas13bC- | GGAACTGGAATCTCTTTCCATAGAA |
| luc_70_ADAR17Top(SEQ ID No. 236) | TGTTCTAAACCATCCTGCGGCCTCT |
| | ACTCTGCATTCAATTACATAC |
| Guide_Cas13bC- | GTGGAACTGGAATCTCTTTCCATAG |
| luc_70_ADAR18Top(SEQ ID No. 237) | AATGTTCTAAACCATCCTGCGGCCT |
| | CTACTCTGCATTCAATTACAT |
| Guide_Cas13bC- | GCCTGGAACTGGAATCTCTTTCCAT |
| luc_70_ADAR19Top(SEQ ID No. 238) | AGAATGTTCTAAACCATCCTGCGGC |
| | CTCTACTCTGCATTCAATTAC |
| Guide_Cas13bC- | GTTCCTGGAACTGGAATCTCTTTCC |
| luc_70_ADAR20Top(SEQ ID No. 239) | ATAGAATGTTCTAAACCATCCTGCG |
| | GCCTCTACTCTGCATTCAATT |
| Guide_Cas13bC- | GGGTTCCTGGAACTGGAATCTCTTT |
| luc_70_ADAR21Top(SEQ ID No. 240) | CCATAGAATGTTCTAAACCATCCTG |
| | CGGCCTCTACTCTGCATTCAA |
| Guide_Cas13bC- | GCAGGTTCCTGGAACTGGAATCTCT |
| luc_70_ADAR22Top(SEQ ID No. 241) | TTCCATAGAATGTTCTAAACCATCC |
| | TGCGGCCTCTACTCTGCATTC |
| Guide_Cas13bC- | GACCAGGTTCCTGGAACTGGAATCT |
| luc_70_ADAR23Top(SEQID No. 242) | CTTTCCATAGAATGTTCTAAACCAT |
| | CCTGCGGCCTCTACTCTGCAT |
| Guide_Cas13bC- | GGTACCAGGTTCCTGGAACTGGAAT |
| luc_70_ADAR24Top(SEQ ID No. 243) | CTCTTTCCATAGAATGTTCTAAACC |
| | ATCCTGCGGCCTCTACTCTGC |
| Guide_Cas13bC- | GATGTACCAGGTTCCTGGAACTGGA |
| luc_70_ADAR25Top(SEQ ID No. 244) | ATCTCTTTCCATAGAATGTTCTAAAC |
| | CATCCTGCGGCCTCTACTCT |
| Guide_Cas13bC- | GGTATGTACCAGGTTCCTGGAACTG |
| luc_70_ADAR26Top(SEQ ID No. 245) | GAATCTCTTTCCATAGAATGTTCTA |
| | AACCATCCTGCGGCCTCTACT |
| Guide_Cas13bC- | GACGTATGTACCAGGTTCCTGGAAC |
| luc_70_ADAR27Top(SEQ ID No. 246) | TGGAATCTCTTTCCATAGAATGTTCT |
| | AAACCATCCTGCGGCCTCTA |
| Guide_Cas13bC- | GACACGTATGTACCAGGTTCCTGGA |
| luc_70_ADAR28Top(SEQ ID No. 247) | ACTGGAATCTCTTTCCATAGAATGT |
| | TCTAAACCATCCTGCGGCCTC |
| | GCAACACGTATGTACCAGGTTCCTG |
| Guide_Cas13bC- | GAACTGGAATCTCTTTCCATAGAAT |
| luc_70_ADAR29Top(SEQ ID No. 248) | GTTCTAAACCATCCTGCGGCC |
| Guide_Cas13bC- | GCCCAACACGTATGTACCAGGTTCC |
| luc_70_ADAR30Top(SEQ ID No. 249) | TGGAACTGGAATCTCTTTCCATAGA |
| | ATGTTCTAAACCATCCTGCGG |
| Guide_Cas13bC- | GGACCCAACACGTATGTACCAGGTT |
| luc_70_ADAR31Top(SEQ ID No. 250) | CCTGGAACTGGAATCTCTTTCCATA |
| | GAATGTTCTAAACCATCCTGC |
| Guide_Cas13bC- | GTTGACCCAACACGTATGTACCAGG |
| luc_70_ADAR32Top(SEQ ID No. 251) | TTCCTGGAACTGGAATCTCTTTCCAT |
| | AGAATGTTCTAAACCATCCT |
| Guide_Cas13bC- | GCCTTGACCCAACACGTATGTACCA |
| luc_70_ADAR33Top(SEQ ID No. 252) | GGTTCCTGGAACTGGAATCTCTTTC |
| | CATAGAATGTTCTAAACCATC |
| | GTTCCTTGACCCAACACGTATGTAC |
| Guide_Cas13bC- | CAGGTTCCTGGAACTGGAATCTCTT |
| luc_70_ADAR34Top(SEQ ID No. 253) | TCCATAGAATGTTCTAAACCA |
| Guide_Cas13bC- | GCATCCTGCGGCCTCTACTCTGCATT |
| luc_84 ADAROTop(SEQ ID No. 254) | CAATTACATACTGACACATTCGGCA |
| | ACATGTTTTTCCTGGTTTATTTTCAC |
| | ACAGTCCA |
| Guide_Cas13bC- | GACCATCCTGCGGCCTCTACTCTGC |
| luc_84_ADAR1Top(SEQ ID No. 255) | ATTCAATTACATACTGACACATTCG |
| | GCAACATGTTTTTCCTGGTTTATTTT |
| | CACACAGTC |
| Guide_Cas13bC- | GAAACCATCCTGCGGCCTCTACTCT |
| luc_84_ADAR2Top(SEQ ID No. 256) | GCATTCAATTACATACTGACACATT |
| | CGGCAACATGTTTTTCCTGGTTTATT |
| | TTCACACAG |
| Guide_Cas13bC- | GCTAAACCATCCTGCGGCCTCTACT |
| luc_84_ADAR3Top(SEQ ID No. 257) | CTGCATTCAATTACATACTGACACA |
| | TTCGGCAACATGTTTTTCCTGGTTTA |
| | TTTTCACAC |
| Guide_Cas13bC- | GTTCTAAACCATCCTGCGGCCTCTA |
| luc_84_ADAR4Top(SEQ ID No. 258) | CTCTGCATTCAATTACATACTGACA |
| | CATTCGGCAACATGTTTTTCCTGGTT |
| | TATTTTCAC |
| Guide_Cas13bC- | GTGTTCTAAACCATCCTGCGGCCTC |
| luc_84_ADAR5Top(SEQ ID No. 259) | TACTCTGCATTCAATTACATACTGA |
| | CACATTCGGCAACATGTTTTTCCTG |
| | GTTTATTTTC |
| Guide_Cas13bC- | GAATGTTCTAAACCATCCTGCGGCC |
| luc_84_ADAR6Top(SEQ ID No. 260) | TCTACTCTGCATTCAATTACATACTG |
| | ACACATTCGGCAACATGTTTTTCCT |
| | GGTTTATTT |
| Guide_Cas13bC- | GAGAATGTTCTAAACCATCCTGCGG |
| luc_84_ADAR7Top(SEQ ID No. 261) | CCTCTACTCTGCATTCAATTACATAC |
| | TGACACATTCGGCAACATGTTTTTC |
| | CTGGTTTAT |
| Guide_Cas13bC- | GATAGAATGTTCTAAACCATCCTGC |
| luc_84_ADAR8Top(SEQ ID No. 262) | GGCCTCTACTCTGCATTCAATTACAT |
| | ACTGACACATTCGGCAACATGTTTT |
| | TCCTGGTTT |
| Guide_Cas13bC- | GCCATAGAATGTTCTAAACCATCCT |
| luc_84_ADAR9Top(SEQ ID No. 263) | GCGGCCTCTACTCTGCATTCAATTA |
| | CATACTGACACATTCGGCAACATGT |
| | TTTTCCTGGT |
| Guide_Cas13bC- | GTTCCATAGAATGTTCTAAACCATC |
| luc_84_ADAR10Top(SEQ ID No. 264) | CTGCGGCCTCTACTCTGCATTCAATT |
| | ACATACTGACACATTCGGCAACATG |
| | TTTTTCCTG |
| Guide_Cas13bC- | GCTTTCCATAGAATGTTCTAAACCA |
| luc_84_ADAR11Top(SEQ ID No. 265) | TCCTGCGGCCTCTACTCTGCATTCAA |
| | TTACATACTGACACATTCGGCAACA |
| | TGTTTTTCC |
| Guide_Cas13bC- | GCTCTTTCCATAGAATGTTCTAAAC |
| luc_84_ADAR12Top(SEQ ID No. 266) | CATCCTGCGGCCTCTACTCTGCATTC |
| | AATTACATACTGACACATTCGGCAA |
| | CATGTTTTT |
| Guide_Cas13bC- | GATCTCTTTCCATAGAATGTTCTAA |
| luc_84_ADAR13Top(SEQ ID No. 267) | ACCATCCTGCGGCCTCTACTCTGCA |
| | TTCAATTACATACTGACACATTCGG |
| | CAACATGTTT |
| Guide_Cas13bC- | GGAATCTCTTTCCATAGAATGTTCT |
| luc_84_ADAR14Top(SEQ ID No. 268) | AAACCATCCTGCGGCCTCTACTCTG |
| | CATTCAATTACATACTGACACATTC |
| | GGCAACATGT |
| Guide_Cas13bC- | GTGGAATCTCTTTCCATAGAATGTT |
| luc_84_ADAR15Top(SEQ ID No. 269) | CTAAACCATCCTGCGGCCTCTACTC |
| | TGCATTCAATTACATACTGACACAT |
| | TCGGCAACAT |
| Guide_Cas13bC- | GACTGGAATCTCTTTCCATAGAATG |
| luc_84_ADAR16Top(SEQ ID No. 270) | TTCTAAACCATCCTGCGGCCTCTACT |
| | CTGCATTCAATTACATACTGACACA |
| | TTCGGCAAC |
| Guide_Cas13bC- | GGAACTGGAATCTCTTTCCATAGAA |
| luc_84_ADAR17Top(SEQ ID No. 271) | TGTTCTAAACCATCCTGCGGCCTCT |
| | ACTCTGCATTCAATTACATACTGAC |
| | ACATTCGGCA |
| Guide_Cas13bC- | GTGGAACTGGAATCTCTTTCCATAG |
| luc_84_ADAR18Top(SEQ ID No. 272) | AATGTTCTAAACCATCCTGCGGCCT |
| | CTACTCTGCATTCAATTACATACTG |
| | ACACATTCGG |
| Guide_Cas13bC- | GCCTGGAACTGGAATCTCTTTCCAT |
| luc_84_ADAR19Top(SEQ ID No. 273) | AGAATGTTCTAAACCATCCTGCGGC |
| | CTCTACTCTGCATTCAATTACATACT |
| | GACACATTC |
| Guide_Cas13bC- | GTTCCTGGAACTGGAATCTCTTTCC |
| luc_84_ADAR20Top(SEQ ID No. 274) | ATAGAATGTTCTAAACCATCCTGCG |
| | GCCTCTACTCTGCATTCAATTACATA |
| | CTGACACAT |
| Guide_Cas13bC- | GGGTTCCTGGAACTGGAATCTCTTT |
| luc_84_ADAR21Top(SEQ ID No. 275) | CCATAGAATGTTCTAAACCATCCTG |
| | CGGCCTCTACTCTGCATTCAATTAC |
| | ATACTGACAC |
| Guide_Cas13bC- | GCAGGTTCCTGGAACTGGAATCTCT |
| luc_84_ADAR22Top(SEQ ID No. 276) | TTCCATAGAATGTTCTAAACCATCC |
| | TGCGGCCTCTACTCTGCATTCAATTA |
| | CATACTGAC |
| Guide_Cas13bC- | GACCAGGTTCCTGGAACTGGAATCT |
| luc_84_ADAR23Top(SEQ ID No. 277) | CTTTCCATAGAATGTTCTAAACCAT |
| | CCTGCGGCCTCTACTCTGCATTCAAT |
| | TACATACTG |
| Guide_Cas13bC- | GGTACCAGGTTCCTGGAACTGGAAT |
| luc_84_ADAR24Top(SEQ ID No. 278) | CTCTTTCCATAGAATGTTCTAAACC |
| | ATCCTGCGGCCTCTACTCTGCATTCA |
| | ATTACATAC |
| Guide_Cas13bC- | GATGTACCAGGTTCCTGGAACTGGA |
| luc_84_ADAR25Top(SEQ ID No. 279) | ATCTCTTTCCATAGAATGTTCTAAAC |
| | CATCCTGCGGCCTCTACTCTGCATTC |
| | AATTACAT |
| Guide_Cas13bC- | GGTATGTACCAGGTTCCTGGAACTG |
| luc_84_ADAR26Top(SEQ ID No. 280) | GAATCTCTTTCCATAGAATGTTCTA |
| | AACCATCCTGCGGCCTCTACTCTGC |
| | ATTCAATTAC |
| Guide_Cas13bC- | GACGTATGTACCAGGTTCCTGGAAC |
| luc_84_ADAR27Top(SEQ ID No. 281) | TGGAATCTCTTTCCATAGAATGTTCT |
| | AAACCATCCTGCGGCCTCTACTCTG |
| | CATTCAATT |
| Guide_Cas13bC- | GACACGTATGTACCAGGTTCCTGGA |
| luc_84_ADAR28Top(SEQ ID No. 282) | ACTGGAATCTCTTTCCATAGAATGT |
| | TCTAAACCATCCTGCGGCCTCTACT |
| | CTGCATTCAA |
| Guide_Cas13bC- | GCAACACGTATGTACCAGGTTCCTG |
| luc_84_ADAR29Top(SEQ ID No. 283) | GAACTGGAATCTCTTTCCATAGAAT |
| | GTTCTAAACCATCCTGCGGCCTCTA |
| | CTCTGCATTC |
| Guide_Cas13bC- | GCCCAACACGTATGTACCAGGTTCC |
| luc_84_ADAR30Top(SEQ ID No. 284) | TGGAACTGGAATCTCTTTCCATAGA |
| | ATGTTCTAAACCATCCTGCGGCCTC |
| | TACTCTGCAT |
| Guide_Cas13bC- | GGACCCAACACGTATGTACCAGGTT |
| luc_84_ADAR31Top(SEQ ID No. 285) | CCTGGAACTGGAATCTCTTTCCATA |
| | GAATGTTCTAAACCATCCTGCGGCC |
| | TCTACTCTGC |
| Guide_Cas13bC- | GTTGACCCAACACGTATGTACCAGG |
| luc_84_ADAR32Top(SEQ ID No. 286) | TTCCTGGAACTGGAATCTCTTTCCAT |
| | AGAATGTTCTAAACCATCCTGCGGC |
| | CTCTACTCT |
| Guide_Cas13bC- | GCCTTGACCCAACACGTATGTACCA |
| luc_84_ADAR33Top(SEQ ID No. 287) | GGTTCCTGGAACTGGAATCTCTTTC |
| | CATAGAATGTTCTAAACCATCCTGC |
| | GGCCTCTACT |
| Guide_Cas13bC- | GTTCCTTGACCCAACACGTATGTAC |
| luc_84_ADAR34Top(SEQ ID No. 288) | CAGGTTCCTGGAACTGGAATCTCTT |
| | TCCATAGAATGTTCTAAACCATCCT |
| | GCGGCCTCTA |
| Guide_Cas13bC- | GGGTTCCTTGACCCAACACGTATGT |
| luc_84_ADAR35Top(SEQ ID No. 289) | ACCAGGTTCCTGGAACTGGAATCTC |
| | TTTCCATAGAATGTTCTAAACCATC |
| | CTGCGGCCTC |
| Guide_Cas13bC- | GTTGGTTCCTTGACCCAACACGTAT |
| luc_84_ADAR36Top(SEQ ID No. 290) | GTACCAGGTTCCTGGAACTGGAATC |
| | TCTTTCCATAGAATGTTCTAAACCAT |
| | CCTGCGGCC |
| Guide_Cas13bC- | GCCTTGGTTCCTTGACCCAACACGT |
| luc_84_ADAR37Top(SEQ ID No. 291) | ATGTACCAGGTTCCTGGAACTGGAA |
| | TCTCTTTCCATAGAATGTTCTAAACC |
| | ATCCTGCGG |
| Guide_Cas13bC- | GGCCCTTGGTTCCTTGACCCAACAC |
| luc_84_ADAR38Top(SEQ ID No. 292) | GTATGTACCAGGTTCCTGGAACTGG |
| | AATCTCTTTCCATAGAATGTTCTAA |
| | ACCATCCTGC |
| Guide_Cas13bC- | GCCGCCCTTGGTTCCTTGACCCAAC |
| luc_84_ADAR39Top(SEQ ID No. 293) | ACGTATGTACCAGGTTCCTGGAACT |
| | GGAATCTCTTTCCATAGAATGTTCT |
| | AAACCATCCT |
| Guide_Cas13bC- | GCGCCGCCCTTGGTTCCTTGACCCA |
| luc_84_ADAR40Top(SEQ ID No. 294) | ACACGTATGTACCAGGTTCCTGGAA |
| | CTGGAATCTCTTTCCATAGAATGTTC |
| | TAAACCATC |
| Guide_Cas13bC- | GGTCGCCGCCCTTGGTTCCTTGACC |
| luc_84_ADAR41Top(SEQ ID No. 295) | CAACACGTATGTACCAGGTTCCTGG |
| | AACTGGAATCTCTTTCCATAGAATG |
| | TTCTAAACCA |

### Reversing Causal Disease Mutations

[1409] The three genes in the Table below are synthesised with the pathogenic G>A mutation that introduces apre-termination stop site into the gene and integrate them into a non-human cell line. The ability of Cas113b112-ADAR2 to correct the transcripts by changing the stop codon UAG to UIG (UGG) and thus restore protein translation is tested.

| Protein | | | |
|---|---|---|---|
| length | | | |
| (aa) | Full length candidates | Gene | Disease |
| 498 | NM_004992.3(MECP2): c.311G > A | MECP2 | Rett syndrome |
| | (p.Trp104Ter) | | |
| 414 | NM_007375.3(TARDBP): c.943G > A | TARDBP | Amyotrophic lateral |
| | (p.Ala315Thr) | | sclerosis type 10 |
| 393 | NM_000546.5(TP53): c.273G > A | TP53 | Li-Fraumeni |
| | (p.Trp91Ter) | | syndrome\|Hereditary |
| | | | cancer-predisposing |
| | | | syndrome |

[1410] Forty-eight more pathogenic G>A mutations are shown in Table 5below along with the accompanying disease. 200 bp fragments around these mutations are synthesised, rather than the entire gene, and cloned in front of aGFP. When the pre-termination site is restored, that will allow translation of the GFP and correction can be measured by fluorescence in high-throughput—in addition to RNA sequencing.

TABLE 5

| | Candidate | Gene | Disease |
|---|---|---|---|
| 1 | NM_004006.2(DMD): c.3747G > A | DMD | Duchenne muscular |
| | (p.Trp1249Ter) | | dystrophy |
| 2 | M_000344.3(SMN1): c.305G > A | SMN1 | Spinal muscular atrophy, |
| | (p.Trp102Ter) | | type II\|Kugelberg- |
| | | | Welander disease |
| 3 | NM_000492.3(CFTR): c.3846G > A | CFTR | Cystic fibrosis\|Hereditary |
| | (p.Trp1282Ter) | | pancreatitis\|not |
| | | | provided\|ataluren response - |
| | | | Efficacy |
| 4 | NM_004562.2(PRKN): c.1358G > A | PRKN | Parkinson disease 2 |
| | (p.Trp453Ter) | | |
| 5 | NM_017651.4(AHI1): c.2174G > A | AHI1 | Joubert syndrome 3 |
| | (p.Trp725Ter) | | |
| 6 | NM_000238.3(KCNH2): c.3002G > A | KCNH2 | Long QT syndrome\|not |
| | (p.Trp1001Ter) | | provided |
| 7 | NM_000136.2(FANCC): c.1517G > A | FANCC\|C9orf3 | Fanconi anemia, |
| | (p.Trp506Ter) | | complementation group C |
| 8 | NM_001009944.2(PKD1): c.12420G > A | PKD1 | Polycystic kidney disease, |
| | (p.Trp4140Ter) | | adult type |
| 9 | NM_177965.3(C8orf37): c.555G > A | C8orf37 | Retinitis pigmentosa 64 |
| | (p.Trp185Ter) | | |
| 10 | NM_000833.4(GRIN2A): c.3813G > A | GRIN2A | Epilepsy, focal, with |
| | (p.Trp1271Ter) | | speech disorder and with |
| | | | or without mental |
| | | | retardation |
| 11 | NM_000548.4(TSC2): c.2108G > A | TSC2 | Tuberous sclerosis |
| | (pTrp703Ter) | | 2\|Tuberous sclerosis |
| | | | syndrome |
| 12 | NM_000267.3(NF1): c.7044G > A | NF1 | Neurofibromatosis, type 1 |
| | (p.Trp2348Ter) | | |
| 13 | NM_000520.5(HEXA): c.1454G > A | HEXA | Tay-Sachs disease |
| | (p.Trp485Ter) | | |
| 14 | NM_130838.1(UBE3A): c.2304G > A | UBE3A | Angelman syndrome |
| | (p.Trp768Ter) | | |
| 15 | NM_000543.4(SMPD1): c.168G > A | SMPD1 | Niemann-Pick disease, |
| | (pTrp56Ter) | | type A |
| 16 | NM_000218.2(KCNQ1): c.1175G > A | KCNQ1 | Long QT syndrome |
| | (p.Trp392Ter) | | |
| 17 | NM_000256.3(MYBPC3): c.3293G > A | MYBPC3 | Primary familial |
| | (p.Trp1098Ter) | | hypertrophic |
| | | | cardiomyopathy |
| 18 | (NM_000038.5(APC): c.1262G > A | APC | Familial adenomatous |
| | (p.Trp421Ter) | | polyposis 1 |
| 19 | NM_000249.3(MLH1): c.1998G > A | MLH1 | Lynch syndrome |
| | (p.Trp666Ter) | | |
| 20 | NM_000054.4(AVPR2): c.878G > A | AVPR2 | Nephrogenic diabetes |
| | (p.Trp293Ter) | | insipidus, X-linked |
| 21 | NM_001204.6(BMPR2): c.893G > A | BMPR2 | Primary pulmonary |
| | (p.W298*) | | hypertension |
| 22 | NM_004560.3(ROR2): c.2247G > A | ROR2 | Brachydactyly type B1 |
| | (p.Trp749Ter) | | |
| 23 | NM_000518.4(HBB): c.114G > A | HBB | beta\hat{ }0\hat{ } Thalassemia\|beta |
| | (p.Trp38Ter) | | Thalassemia |
| 24 | NM_024577.3(SH3TC2): c.920G > A | SH3TC2 | Charcot-Marie-Tooth |
| | (p.Trp307Ter) | | disease, type 4C |
| 25 | NM_206933.2(USH2A): c.9390G > A | USH2A | Usher syndrome, type 2A |
| | (p.Trp3130Ter) | | |
| 26 | NM_000179.2(MSH6): c.3020G > A | MSH6 | Lynch syndrome |
| | (p.Trp1007Ter) | | |
| 27 | NM_002977.3(SCN9A): c.2691G > A | SCN9A\|LOC101929680 | Indifference to pain, |
| | (p.Trp897Ter) | | congenital, autosomal |
| | | | recessive |
| 28 | NM_000090.3(COL3A1): c.30G > A | COL3A1 | Ehlers-Danlos syndrome, |
| | (p.Trp10Ter) | | type 4 |
| 29 | NM_000551.3(VHL): c.263G > A | VHL | Von Hippel-Lindau |
| | (p.Trp88Ter) | | syndrome\|not provided |
| 30 | NM_015627.2(LDLRAP1): c.65G > A | LDLRAP1 | Hypercholesterolemia, |
| | (p.Trp22Ter) | | autosomal recessive |
| 31 | NM_000132.3(F8): c.3144G > A | F8 | Hereditary factor VIII |
| | (p.Trp1048Ter) | | deficiency disease |
| 32 | NM_002185.4(IL7R): c.651G > A | IL7R | Severe combined |
| | (p.Trp217Ter) | | immunodeficiency, |
| | | | autosomal recessive, T |
| | | | cell-negative, B cell- |
| | | | positive, NK cell-positive |
| 33 | NM_000527.4(LDLR): c.1449G > A | LDLR | Familial |
| | (p.Trp483Ter) | | hypercholesterolemia |
| 34 | NM_002294.2(LAMP2): c.962G > A | LAMP2 | Danon disease |
| | (p.Trp321Ter) | | |
| 35 | NM_000271.4(NPC1): c.1142G > A | NPC1 | Niemann-Pick disease |
| | (p.Trp381Ter) | | type C1 |
| 36 | NM_000267.3(NF1): c.1713 G > A | NF1 | Neurofibromatosis, type 1 |
| | (p.Trp571Ter) | | |
| 37 | NM_000035.3(ALDOB): c.888G > A | ALDOB | Hereditary fructosuria |
| | (p.Trp296Ter) | | |
| 38 | NM_000090.3(COL3A1): c.3833G > A | COL3A1 | Ehlers-Danlos syndrome, |
| | (p.Trp1278Ter) | | type 4 |
| 39 | NM_001369.2(DNAH5): c.8465G > A | DNAH5 | Primary ciliary dyskinesia |
| | (p.Trp2822Ter) | | |
| 40 | NM_178443.2(FERMT3): c.48G > A | FERMT3 | Leukocyte adhesion |
| | (p.Trp16Ter) | | deficiency, type III |
| 41 | NM_005359.5(SMAD4): c.906G > A | SMAD4 | Juvenile polyposis |
| | (p.Trp302Ter) | | syndrome |
| 42 | NM_032119.3(ADGRV1): c.7406G > A | ADGRV1 | Usher syndrome, type 2C |
| | (p.Trp2469Ter) | | |
| 43 | NM_000206.2(IL2RG): c.710G > A | IL2RG | X-linked severe combined |
| | (p.Trp237Ter) | | immunodeficiency |
| 44 | NM_007294.3(BRCA1): c.5511G > A | BRCA1 | Familial cancer of |
| | (p.Trp1837Ter) | | breast\|Breast-ovarian |
| | | | cancer, familial 1 |
| 45 | NM_130799.2(MEN1): c.1269G > A | MEN1 | Hereditary cancer- |
| | (p.Trp423Ter) | | predisposing syndrome |
| 46 | NM_000071.2(CBS): c.162G > A | CBS | Homocystinuria due to |
| | (p.Trp54Ter) | | CBS deficiency |
| 47 | NM_000059.3(BRCA2): c.582G > A | BRCA2 | Familial cancer of |
| | (p.Trp194Ter) | | breast\|Breast-ovarian |
| | | | cancer, familial 2 |
| 48 | NM_000053.3(ATP7B): c.2336G > A | ATP7B | Wilson disease |
| | (p.Trp779Ter) | | |

### Example 3

[1411] Efficient and precise nucleic acid editing holds great promise for treating genetic disease, particularly at the level of RNA, where disease-relevant transcripts can be rescued to yield functional protein products. Type VI CRISPR-Cas systems contain the programmable single-effector RNA-guided RNases Cas13. Here, we profile the diversity of Type VI systems to engineer a Cas13 ortholog capable of robust knockdown and demonstrate RNA editing by using catalytically-inactive Cas13 (dCas13) to direct adenosine deaminase activity to transcripts in mammalian cells. By fusing the ADAR2 deaminase domain to dCas13 and engineering guide RNAs to create an optimal RNA duplex substrate, we achieve targeted editing of specific single adenosines to inosines (which is read out as guanosine during translation) with efficiencies routinely ranging from 20-40% and up to 89%. This system, referred to as RNA Editing for Programmable A to I Replacement (REPAIR), can be further engineered to achieve high specificity. An engineered variant, REPAIRv2, displays greater than 170-fold increase in specificity while maintaining robust on-target A to I editing as well as minimize the system to ease viral delivery. We use REPAIRv2 to edit full-length transcripts containing known pathogenic mutations and create functional truncated versions suitable for packaging in adeno-associated viral (AAV) vectors. REPAIR presents a promising RNA editing platform with broad applicability for research, therapeutics, and biotechnology. Precise nucleic acid editing technologies are valuable for studying cellular function and as novel therapeutics. Although current editing tools, such as the Cas9 nuclease, can achieve programmable modification of genomic loci, edits are often heterogenous due to insertions or deletions or require a donor template for precise editing. Base editors, such as dCas9-APOBEC fusions, allow for editing without generating a double stranded break, but may lack precision due to the nature of cytidine deaminase activity, which edits any cytidine in a target window. Furthermore, the requirement for a protospacer adjacent motif (PAM) limits the number of possible editing sites. Here, we describe the development of a precise and flexible RNA base editing tool using the RNA-guided RNA targeting Cas13 enzyme from type VI prokaryotic clustered regularly interspaced short palindromic repeats (CRISPR) adaptive immune system.

[1412] Precise nucleic acid editing technologies are valuable for studying cellular function and as novel therapeutics. Current editing tools, based on programmable nucleases such as the prokaryotic clustered regularly interspaced short palindromic repeats (CRISPR)-associated nucleases Cas9 (1-4) or Cpf1(5), have been widely adopted for mediating targeted DNA cleavage which in turn drives targeted gene disruption through non-homologous end joining (NHEJ) or precise gene editing through template-dependent homology-directed repair (HDR)(6). NHEJ utilizes host machineries that are active in both dividing and post-mitotic cells and provides efficient gene disruption by generating a mixture of insertion or deletion (indel) mutations that can lead to frame shifts in protein coding genes. HDR, in contrast, is mediated by host machineries whose expression is largely limited to replicating cells. As such, the development of gene-editing capabilities in post-mitotic cells remains a major challenge. Recently, DNA base editors, such as the use of catalytically inactive Cas9 (dCas9) to target cytidine deaminase activity to specific genome targets to effect cytosine to thymine conversions within a target window, allow for editing without generating a DNA double strand break and significantly reduces the formation of indels(7, 8). However the targeting range of DNA base editors is limited due to the requirement of Cas9 for a protospacer adjacent motif (PAM) at the editing site(9). Here, we describe the development of a precise and flexible RNA base editing technology using the type VI CRISPR-associated RNA-guided RNase Cas13(10-13).

[1413] Cas13 enzymes have two Higher Eukaryotes and Prokaryotes Nucleotide-binding (HEPN) endoRNase domains that mediate precise RNA cleavage(10, 11). Three Cas13 protein families have been identified to date: Cas13a (previously known as C2c2), Cas13b, and Cas13c(12, 13). We recently reported Cas13a enzymes can be adapted as tools for nucleic acid detection(14) as well as mammalian and plant cell RNA knockdown and transcript tracking(15). The RNA-guided nature of Cas13 enzymes makes them attractive tool for RNA binding and perturbation applications.

[1414] The adenosine deaminase acting on RNA (ADAR) family of enzymes mediates endogenous editing of transcripts via hydrolytic deamination of adenosine to inosine, a nucleobase that is functionally equivalent to guanosine in translation and splicing(16). There are two functional human ADAR orthologs, ADAR1 and ADAR2, which consist of N-terminal double stranded RNA-binding domains and a C-terminal catalytic deamination domain. Endogenous target sites of ADAR1 and ADAR2 contain substantial double stranded identity, and the catalytic domains require duplexed regions for efficient editing in vitro and in vivo (18, 19). Importantly, the ADAR catalytic domain is capable of deaminating target adenosines without any protein co-factors in vitro (20). ADAR1 has been found to target mainly repetitive regions whereas ADAR2 mainly targets non-repetitive coding regions (17).Although ADAR proteins have preferred motifs for editing that could restrict the potential flexibility of targeting, hyperactive mutants, such as ADAR(E488Q)(21), relax sequence constraints and improve adenosine to inosine editing rates. ADARs preferentially deaminate adenosines opposite cytidine bases in RNA duplexes(22), providing a promising opportunity for precise base editing. Although previous approaches have engineered targeted ADAR fusions via RNA guides (23-26), the specificity of these approaches has not been reported and their respective targeting mechanisms rely on RNA-RNA hybridization without the assistance of protein partners that may enhance target recognition and stringency.

[1415] Here we assay the entire family of Cas13 enzymes for RNA knockdown activity in mammalian cells and identify the Cas13b ortholog from Prevotella sp. P5-125 (PspCas13b) as the most efficient and specific for mammalian cell applications. We then fuse the ADAR2 deaminase domain (ADARDD) to catalytically inactive PspCas13b and demonstrate RNA editing for programmable A to I (G) replacement (REPAIR) of reporter and endogenous transcripts as well as disease-relevant mutations. Lastly, we employ a rational mutagenesis scheme to improve the specificity of dCas13b-ADAR2DD fusions to generate REPAIRv2 with more than 170 fold increase in specificity.

### Methods

### Design and Cloning of Bacterial Constructs

[1416] Mammalian codon optimized Cas13b constructs were cloned into the chloramphenicol resistant pACYC184 vector under control of the Lac promoter. Two corresponding direct-repeat (DR) sequences separated by BsaI restriction sites were then inserted downstream of Cas13b, under control of the pJ23119 promoter. Last, oligos for targeting spacers were phosphorylated using T4 PNK (New England Biolabs), annealed and ligated into BsaI digested vectors using T7 ligase (Enzymatics) to generate targeting Cas13b vectors. Guide sequences used are in Table 11.

### Bacterial PFS Screens

[1417] Ampicillin resistance plasmids for PFS screens were cloned by inserting PCR products containing Cas13b targets with 2 5′ randomized nucleotides and 4 3′ randomized nucleotides separated by a target site immediately downstream of the start codon of the ampicillin resistance gene bla using NEB Gibson Assembly (New England Biolabs). 100 ng of ampicillin-resistant target plasmids were then electroporated with 65-100 ng chloramphenicol-resistant Cas13b bacterial targeting plasmids into Endura Electrocompetent Cells. Plasmids were added to cells, incubated 15 minutes on ice, electroporated using the manufacturer's protocol, and then 950 uL of recovery media was added to cells before a one hour outgrowth at 37C. The outgrowth was plated onto chloramphenicol and ampicillin double selection plates. Serial dilutions of the outgrowth were used to estimate the cfu/ng DNA. 16 hours post plating, cells were scraped off plates and surviving plasmid DNA harvested using the Qiagen Plasmid Plus Maxi Kit (Qiagen). Surviving Cas13b target sequences and their flanking regions were amplified by PCR and sequenced using an Illumina NextSeq. To assess PFS preferences, the positions containing randomized nucleotides in the original library were extracted, and sequences depleted relative to the vector only condition that were present in both bioreplicates were extracted using custom python scripts. The −log 2 of the ratio of PFS abundance in the Cas13b condition compared to the vector only control was then used to calculate preferred motifs. Specifically, all sequences having −log 2(sample/vector) depletion ratios above a specific threshold were used to generate weblogos of sequence motifs (weblogo.berkeley.edu). The specific depletion ratio values used to generate weblogos for each Cas13b ortholog are listed in Table 9.

### Design and Cloning of Mammalian Constructs for RNA Interference

[1418] To generate vectors for testing Cas13 orthologs in mammalian cells, mammalian codon optimized Cas13a, Cas13b, and Cas13c genes were PCR amplified and golden-gate cloned into a mammalian expression vector containing dual NLS sequences and a C-terminal msfGFP, under control of the EF1alpha promoter. For further optimization Cas13 orthologs were golden gate cloned into destination vectors containing different C-terminal localization tags under control of the EF1alpha promoter.

[1419] The dual luciferase reporter was cloned by PCR amplifying Gaussia and Cypridinia luciferase coding DNA, the EF1alpha and CMV promoters and assembly using the NEB Gibson Assembly (New England Biolabs).

[1420] For expression of mammalian guide RNA for Cas13a, Cas13b, or Cas13c orthologs, the corresponding direct repeat sequences were synthesized with golden-gate acceptor sites and cloned under U6 expression via restriction digest cloning. Individual guides were then cloned into the corresponding expression backbones for each ortholog by golden gate cloning. All Cas13 plasmids are listed in Supplementary Table 10. All Cas13 guide sequences for knockdown experiments are listed in Supplementary Tables 11-13.

### Measurement of Cas13 Expression in Mammalian Cells

[1421] Dual-NLS Cas13-msfGFP constructs were transfected into HEK293FT cells with targeting and non-targeting guides. GFP fluorescence was measured 48 hours post transfection in the non-targeting guide condition using a plate reader.

### Cloning of Pooled Mismatch Libraries for Cas13 Interference Specificity

[1422] Pooled mismatch library target sites were created by PCR. Oligos containing semi-degenerate target sequences in G-luciferase containing a mixture of 94% of the correct base and 2% of each incorrect base at each position within the target were used as one primer, and an oligo corresponding to a non-targeted region of G-luciferase was used as the second primer in the PCR reaction. The mismatch library target was then cloned into the dual luciferase reporter in place of the wildtype G-luciferase using NEB Gibson assembly (New England Biolabs).

### Design and Cloning of Mammalian Constructs for RNA Editing

[1423] PspCas13b was made catalytically inactive (dPspCas13b) via two histidine to alanine mutations (H133A/H1058A) at the catalytic site of the HEPN domains. The deaminase domains of human ADAR1 and ADAR2 were synthesized and PCR amplified for gibson cloning into pcDNA-CMV vector backbones and were fused to dPspCas13b at the C-terminus via GS or GSGGGGS (SEQ ID No. 296) linkers. For the experiment in which we tested different linkers we cloned the following additional linkers between dPspCas13b and ADAR2dd: GGGGSGGGGSGGGGS, EAAAK (SEQ ID No. 297), GGSGGSGGSGGSGGSGGS (SEQ ID No. 298), and SGSETPGTSESATPES (SEQ ID No. 299)(XTEN). Specificity mutants were generated by gibson cloning the appropriate mutants into the dPspCas13b-GSGGGGS backbone.

[1424] The luciferase reporter vector for measuring RNA editing activity was generated by creating a W85X mutation (TGG>TAG) in the luciferase reporter vector used for knockdown experiments. This reporter vector expresses functional Gluc as a normalization control, but a defective Cluc due to the addition of a pretermination site. To test ADAR editing motif preferences, we cloned every possible motif around the adenosine at codon 85 (XAX) of Cluc. All plasmids are listed in Supplementary Table 10.

[1425] For testing PFS preference of REPAIR, we cloned a pooled plasmid library containing a 6 basepair degenerate PFS sequence upstream of a target region and adenosine editing site. The library was synthesized as an ultramer from Integrated DNA Technologies (IDT) and was made double stranded via annealing a primer and Klenow fragment of DNA polymerase I (New England Biolabs) fill in of the sequence. This dsDNA fragment containing the degenerate sequence was then gibson cloned into the digested reporter vector and this was then isopropanol precipitated and purified. The cloned library was then electroporated into Endura competent E. coli cells (Lucigen) and plated on 245 mm×245 mm square bioassay plates (Nunc). After 16 hours, colonies were harvested and midiprepped using endotoxin-free MACHEREY-NAGEL midiprep kits. Cloned libraries were verified by next generation sequencing.

[1426] For cloning disease-relevant mutations for testing REPAIR activity, 34 G>A mutations related to disease pathogenesis as defined in ClinVar were selected and 200 bp regions surrounding these mutations were golden gate cloned between mScarlett and EGFP under a CMV promoter. Two additional G>A mutations in AVPR2 and FANCC were selected for Gibson cloning the whole gene sequence under expression of EF1alpha.

[1427] For expression of mammalian guide RNA for REPAIR, the PspCas13b direct repeat sequences were synthesized with golden-gate acceptor sites and cloned under U6 expression via restriction digest cloning. Individual guides were then cloned into this expression backbones by golden gate cloning. Guide sequences for REPAIR experiments are listed in Supplementary Table 14.

### Mammalian Cell Culture

[1428] Mammalian cell culture experiments were performed in the HEK293FT line (American Type Culture Collection (ATCC)), which was grown in Dulbecco's Modified Eagle Medium with high glucose, sodium pyruvate, and GlutaMAX (Thermo Fisher Scientific), additionally supplemented with 1× penicillin-streptomycin (Thermo Fisher Scientific) and 10% fetal bovine serum (VWR Seradigm). Cells were maintained at confluency below 80%.

[1429] Unless otherwise noted, all transfections were performed with Lipofectamine 2000 (Thermo Fisher Scientific) in 96-well plates coated with poly-D-lysine (BD Biocoat). Cells were plated at approximately 20,000 cells/well sixteen hours prior to transfection to ensure 90% confluency at the time of transfection. For each well on the plate, transfection plasmids were combined with Opti-MEM I Reduced Serum Medium (Thermo Fisher) to a total of 25 μl. Separately, 24.5 ul of Opti-MEM was combined with 0.5 ul of Lipofectamine 2000. Plasmid and Lipofectamine solutions were then combined and incubated for 5 minutes, after which they were pipetted onto cells. The U20S transfections were performed using Lipofectamine 3000 according to the manufacturer's protocol.

### RNA Knockdown Mammalian Cell Assays

[1430] To assess RNA targeting in mammalian cells with reporter constructs, 150 ng of Cas13 construct was co-transfected with 300 ng of guide expression plasmid and 12.5 ng of the knockdown reporter construct. 48 hours post-transfection, media containing secreted luciferase was removed from cells, diluted 1:5 in PBS, and measured for activity with BioLux Cypridinia and Biolux Gaussia luciferase assay kits (New England Biolabs) on a plate reader (Biotek Synergy Neo2) with an injection protocol. All replicates performed are biological replicates.

[1431] For targeting of endogenous genes, 150 ng of Cas13 construct was co-transfected with 300 ng of guide expression plasmid. 48 hours post-transfection, cells were lysed and RNA was harvested and reverse transcribed using a previously described (33) modification of the Cells-to-Ct kit (Thermo Fisher Scientific). cDNA expression was measured via qPCR using TaqMan qPCR probes for the KRAS transcript (Thermo Fisher Scientific), GAPDH control probes (Thermo Fisher Scientific), and Fast Advanced Master Mix (Thermo Fisher Scientific). qPCR reactions were read out on a LightCycler 480 Instrument II (Roche), with four 5 ul technical replicates in 384-well format.

### Evaluation of RNA Specificity Using Pooled Library of Mismatched Targets

[1432] The ability of Cas13 to interfere with the mismatched target library was tested using HEK293FT cells seeded in 6 well plates. ˜70% confluent cells were transfected using 2400 ng Cas13 vector, 4800 ng of guide and 240 ng of mismatched target library. 48 hours post transfection, cells were harvested and RNA extracted using the QIAshredder (Qiagen) and the Qiagen RNeasy Mini Kit. lug of extracted RNA was reverse transcribed using the qScript Flex cDNA synthesis kit (Quantabio) following the manufacturer's gene-specific priming protocol and a Gluc specific RT primer. cDNA was then amplified and sequenced on an Illumina NextSeq.

[1433] The sequencing was analyzed by counting reads per sequence and depletion scores were calculated by determining the log 2(-read count ratio) value, where read count ratio is the ratio of read counts in the targeting guide condition versus the non-targeting guide condition. This score value represents the level of Cas13 activity on the sequence, with higher values representing stronger depletion and thus higher Cas13 cleavage activity. Separate distributions for the single mismatch and double mismatch sequences were determined and plotted as heatmaps with a depletion score for each mismatch identity. For double mismatch sequences the average of all possible double mismatches at a given position were plotted.

### Transcriptome-Wide Profiling of Cas13 in Mammalian Cells by RNA Sequencing

[1434] For measurement of transcriptome-wide specificity, 150 ng of Cas13 construct, 300 ng of guide expression plasmid and 15 ng of the knockdown reporter construct were co-transfected; for shRNA conditions, 300 ng of shRNA targeting plasmid, 15 ng of the knockdown reporter construct, and 150 ng of EF1-alpha driven mCherry (to balance reporter load) were co-transfected. 48 hours after transfection, RNA was purified with the RNeasy Plus Mini kit (Qiagen), mRNA was selected for using NEBNext Poly(A) mRNA Magnetic Isolation Module (New England Biolabs) and prepared for sequencing with the NEBNext Ultra RNA Library Prep Kit for Illumina (New England Biolabs). RNA sequencing libraries were then sequenced on a NextSeq (Illumina).

[1435] To analyze transcriptome-wide sequencing data, reads were aligned RefSeq GRCh38 assembly using Bowtie and RSEM version 1.2.31 with default parameters (34): accurate transcript quantification from RNA-Seq data with or without a reference genome]. Transcript expression was quantified as log 2(TPM+1), genes were filtered for log 2(TPM+1)>2.5 For selection of differentially expressed genes, only genes with differential changes of >2 or <0.75 were considered. Statistical significance of differential expression was evaluated Student's T-test on three targeting replicates versus non-targeting replicates, and filtered for a false discovery rate of <0.01% by Benjamini-Hochberg procedure.

### ADAR RNA Editing in Mammalian Cells Transfections

[1436] To assess REPAIR activity in mammalian cells, we transfected 150 ng of REPAIR vector, 300 ng of guide expression plasmid, and 40 ng of the RNA editing reporter. After 48 hours, RNA from cells were harvested and reverse transcribed using a method previously described (33) with a gene specific reverse transcription primer. The extracted cDNA was then subjected to two rounds of PCR to add Illumina adaptors and sample barcodes using NEBNext High-Fidelity 2×PCR Master Mix (New England Biolabs). The library was then subjected to next generation sequencing on an Illumina NextSeq or MiSeq. RNA editing rates were then evaluated at all adenosine within the sequencing window.

[1437] In experiments where the luciferase reporter was targeted for RNA editing, we also harvested the media with secreted luciferase prior to RNA harvest. In this case, because the corrected Cluc might be at low levels, we did not dilute the media. We measured luciferase activity with BioLux Cypridinia and Biolux Gaussia luciferase assay kits (New England Biolabs) on a plate reader (Biotek Synergy Neo2) with an injection protocol. All replicates performed are biological replicates.

### PFS Binding Mammalian Screen

[1438] To determine the contribution of the PFS to editing efficiency, 625 ng of PFS target library, 4.7 ug of guide, and 2.35 ug of REPAIR were co-transfected on HEK293FT cells plated in 225 cm2 flasks. Plasmids were mixed with 33 ul of PLUS reagent (Thermo Fisher Scientific), brought to 533 ul with Opti-MEM, incubated for 5 minutes, combined with 30 ul of Lipofectamine 2000 and 500 ul of Opti-MEM, incubated for an additional 5 minutes, and then pipetted onto cells. 48 hours post-transfection, RNA was harvested with the RNeasy Plus Mini kit (Qiagen), reverse transcribed with qScript Flex (Quantabio) using a gene specific primer, and amplified with two rounds of PCR using NEBNext High-Fidelity 2×PCR Master Mix (New England Biolabs) to add Illumina adaptors and sample barcodes. The library was sequenced on an Illumina NextSeq, and RNA editing rates at the target adenosine were mapped to PFS identity. To increase coverage, the PFS was computationally collapsed to 4 nucleotides. REPAIR editing rates were calculated for each PFS, averaged over biological replicates with non-targeting rates for the corresponding PFS subtracted.

### Whole-Transcriptome Sequencing to Evaluate ADAR Editing Specificity

[1439] For analyzing off-target RNA editing sites across the transcriptome, we harvested total RNA from cells 48 hours post transfection using the RNeasy Plus Miniprep kit (Qiagen). The mRNA fraction is then enriched using a NEBNext Poly(A) mRNA Magnetic Isolation Module (NEB) and this RNA is then prepared for sequencing using NEBNext Ultra RNA Library Prep Kit for Illumina (NEB). The libraries were then sequenced on an Illumina NextSeq and loaded such that there was at least 5 million reads per sample.

### RNA Editing Analysis for Targeted and Transcriptome Wide Experiments

[1440] Analysis of the transcriptome-wide editing RNA sequencing data was performed on the FireCloud computational framework (https://software.broadinstitute.org/firecloud/) using a custom workflow we developed: https://portal.firecloud.org/#methods/m/rna_editing_final_workflow/rna_editing_final_wo rkflow/1. For analysis, unless otherwise denoted, sequence files were randomly downsampled to 5 million reads. An index was generated using the RefSeq GRCh38 assembly with Gluc and Cluc sequences added and reads were aligned and quantified using Bowtie/RSEM version 1.3.0. Alignment BAMs were then sorted and analyzed for RNA editing sites using REDitools (35,36) with the following parameters: -t 8 -e -d -l -U [AG or TC]-p -u -m20 -T6-0 -W -v l -n 0.0. Any significant edits found in untransfected or EGFP-transfected conditions were considered to be SNPs or artifacts of the transfection and filtered out from the analysis of off-targets. Off-targets were considered significant if the Fisher's exact test yielded a p-value less than 0.05 after multiple hypothesis correction by Benjamini Hochberg correction and at least 2 of 3 biological replicates identified the edit site. Overlap of edits between samples was calculated relative to the maximum possible overlap, equivalent to the fewer number of edits between the two samples. The percentage of overlapping edit sites was calculated as the number of shared edit sites divided by minimum number of edits of the two samples, multiplied by 100. For the high-coverage sequencing analysis, an additional layer of filtering for known SNP positions was performed using the Kaviar (37) method for identifying SNPs.

[1441] For analyzing the predicted variant effects of each off-target, the list of off-target edit sites was analyzed using the variant annotation integrator (https://genome.ucsc.edu/cgi-bin/hgVai) as part of the UCSC genome browser suite of tools using the SIFT and PolyPhen-2 annotations. To declare whether the off-target genes are oncogenic, a database of oncogenic annotations from the COSMIC catalogue of somatic mutations in cancer (cancer.sanger.ac.uk).

[1442] For analyzing whether the REPAIR constructs perturbed RNA levels, the transcript per million (TPM) values output from the RSEM analysis were used for expression counts and transformed to log-space by taking the log 2(TPM+1). To find differentially regulated genes, a Student's t-test was performed on three targeting guide replicates versus three non-targeting guide replicates. The statistical analysis was only performed on genes with log 2(TPM+1) values greater than 2.5 and genes were only considered differentially regulated if they had a fold change greater than 2 or less than 0.8. Genes were reported if they had a false discovery rate of less than 0.01.

### Results

### Comprehensive Characterization of Cas13 Family Members in Mammalian Cells

[1443] We previously developed LwaCas13a for mammalian knockdown applications, but it required an msfGFP stabilization domain for efficient knockdown and, although the specificity was high, knockdown efficiencies were not consistently below 50%(15). We sought to identify a more robust RNA-targeting CRISPR system by characterizing a genetically diverse set of Cas13 family members to assess their RNA knockdown activity in mammalian cells (FIG. 49A). We cloned 21 Cas13a, 15 Cas13b, and 7 Cas13c mammalian codon-optimized orthologs (Table 6) into an expression vector with N- and C-terminal nuclear export signal (NES) sequences and a C-terminal msfGFP to enhance protein stability. To assay interference in mammalian cells, we designed a dual reporter construct expressing the orthogonal Gaussia (Gluc) and Cypridinia (Cluc) luciferases under separate promoters, which allows one luciferase to function as a measure of Cas13 interference activity and the other to serve as an internal control. For each ortholog, we designed PFS-compatible guide RNAs, using the Cas13b PFS motifs derived from an ampicillin interference assay (FIG. 55; Table 7) and the 3′ H PFS (not G) from previous reports of Cas13a activity(10).

[1444] We transfected HEK293FT cells with Cas13 expression, guide RNA and reporter plasmids and quantified levels of the targeted Gluc 48 hours later (FIG. 49B, 69A). Testing two guide RNAs for each Cas13 ortholog revealed a range of activity levels, including five Cas13b orthologs with similar or increased interference across both guide RNAs relative to the recently characterized LwaCas13a (FIG. 49B), and we observed only a weak correlation between Cas13 expression and interference activity (FIG. 69B-D). We selected these five Cas13b orthologs, as well as the top two Cas13a orthologs for further engineering.

[1445] We next tested for Cas13-mediated knockdown of Gluc without msfGFP, in order to select orthologs that do not require stabilization domains for robust activity. We hypothesized that, in addition to msfGFP, Cas13 activity could be affected by subcellular localization, as previously reported for optimization of LwaCas13a(5). Therefore, we tested the interference activity of the seven selected Cas13 orthologs C-terminally fused to one of six different localization tags without msfGFP. Using the luciferase reporter assay, we found that PspCas13b and PguCas13b C-terminally fused to the HIV Rev gene NES and RanCas13b C-terminally fused to the MAPK NES had the highest levels of interference activity (FIG. 56A). To further distinguish activity levels of the top orthologs, we compared the three optimized Cas13b constructs to the optimal LwaCas13a-msfGFP fusion and shRNA for their ability to knockdown the KRAS transcript using position-matched guides (FIG. 56B). We observed the highest levels interference for PspCas13b (average knockdown 62.9%) and thus selected this for further comparison to LwaCas13a.

[1446] To more rigorously define the activity level of PspCas13b and LwaCas13a we designed position matched guides tiling along both Gluc and Cluc and assayed their activity using our luciferase reporter assay. We tested 93 and 20 position matched guides targeting Gluc and Cluc, respectively, and found that PspCas13b had consistently increased levels of knockdown relative to LwaCas13a (average of 92.3% for PspCas13b vs. 40.1% knockdown for LwaCas13a) (FIG. 49C,D).

### Specificity of Cas13 Mammalian Interference Activity

[1447] To characterize the interference specificities of PspCas13b and LwaCas13a we designed a plasmid library of luciferase targets containing single mismatches and double mismatches throughout the target sequence and the three flanking 5′ and 3′ base pairs (FIG. 56C). We transfected HEK293FT cells with either LwaCas13a or PspCas13b, a fixed guide RNA targeting the unmodified target sequence, and the mismatched target library corresponding to the appropriate system. We then performed targeted RNA sequencing of uncleaved transcripts to quantify depletion of mismatched target sequences. We found that LwaCas13a and PspCas13b had a central region that was relatively intolerant to single mismatches, extending from base pairs 12-26 for the PspCas13b target and 13-24 for the LwaCas13a target (FIG. 56D). Double mismatches were even less tolerated than single mutations, with little knockdown activity observed over a larger window, extending from base pairs 12-29 for PspCas13b and 8-27 for LwaCas13a in their respective targets (FIG. 56E). Additionally, because there are mismatches included in the three nucleotides flanking the 5′ and 3′ ends of the target sequence, we could assess PFS constraints on Cas13 knockdown activity. Sequencing showed that almost all PFS combinations allowed robust knockdown, indicating that a PFS constraint for interference in mammalian cells likely does not exist for either enzyme tested. These results indicate that Cas13a and Cas13b display similar sequence constraints and sensitivities against mismatches.

[1448] We next characterized the interference specificity of PspCas13b and LwaCas13a across the mRNA fraction of the transcriptome. We performed transcriptome-wide mRNA sequencing to detect significant differentially expressed genes. LwaCas13a and PspCas13b demonstrated robust knockdown of Gluc (FIG. 49E,F) and were highly specific compared to a position-matched shRNA, which showed hundreds of off-targets (FIG. 49G), consistent with our previous characterization of LwaCas13a specificity in mammalian cells (15).

### Cas13-ADAR Fusions Enable Targeted RNA Editing

[1449] Given that PspCas13b achieved consistent, robust, and specific knockdown of mRNA in mammalian cells, we envisioned that it could be adapted as an RNA binding platform to recruit the deaminase domain of ADARs (ADAR_{DD}) for programmable RNA editing. To engineer a PspCas13b lacking nuclease activity (dPspCas13b, referred to as dCas13b from here), we mutated conserved catalytic residues in the HEPN domains and observed loss of luciferase RNA knockdown activity (FIG. 57A). We hypothesized that a dCas13b-ADAR_{DD}fusion could be recruited by a guide RNA to target adenosines, with the hybridized RNA creating the required duplex substrate for ADAR activity (FIG. 50A). To enhance target adenosine deamination rates we introduced two additional modifications to our initial RNA editing design: we introduced a mismatched cytidine opposite the target adenosine, which has been previously reported to increase deamination frequency, and fused dCas13b with the deaminase domains of human ADAR1 or ADAR2 containing hyperactivating mutations to enhance catalytic activity (ADAR1_{DD}(E1008Q)(27) or ADAR2_{DD}(E488Q)(21)).

[1450] To test the activity of dCas3b-ADAR_{DD}we generated an RNA-editing reporter on Cluc by introducing a nonsense mutation (W85X (UGG->UAG)), which could functionally be repaired to the wildtype codon through A->I editing (FIG. 50B) and then be detected as restoration of Cluc luminescence. We evenly tiled guides with spacers 30, 50, 70 or 84 nucleotides in length across the target adenosine to determine the optimal guide placement and design (FIG. 50C). We found that dCas3b-ADAR1_{DD}required longer guides to repair the Cluc reporter, while dCas13b-ADAR2_{DD}was functional with all guide lengths tested (FIG. 50C). We also found that the hyperactive E488Q mutation improved editing efficiency, as luciferase restoration with the wildtype ADAR2_{DD}was reduced (FIG. 57B). From this demonstration of activity, we chose dCas13b-ADAR2_{DD}(E488Q) for further characterization and designated this approach as RNA Editing for Programmable A to I Replacement version 1 (REPAIRv1).

[1451] To validate that restoration of luciferase activity was due to bonafide editing events, we measured editing of Cluc transcripts subject to REPAIRv1 directly via reverse transcription and targeted next-generation sequencing. We tested 30- and 50-nt spacers around the target site and found that both guide lengths resulted in the expected A to I edit, with 50-nt spacers achieving higher editing percentages (FIG. 50D,E, FIG. 57C). We also observed that 50-nt spacers had an increased propensity for editing at non-targeted adenosines, likely due to increased regions of duplex RNA (FIG. 50E, FIG. 57C).

[1452] We next targeted an endogenous gene, PPIB. We designed 50-nt spacers tiling PPIB and found that we could edit the PPIB transcript with up to 28% editing efficiency (FIG. 57D). To test if REPAIR could be further optimized, we modified the linker between dCas13b and ADAR2_{DD}(E488Q) (FIG. 57E, Table 8) and found that linker choice modestly affected luciferase activity restoration. Additionally, we tested the ability of dCas13b and guide alone to mediate editing events, finding that the ADAR deaminase domain is required for editing (FIG. 70A-D).

### Defining the Sequence Parameters for RNA Editing

[1453] Given that we could achieve precise RNA editing at a test site, we wanted to characterize the sequence constraints for programming the system against any RNA target in the transcriptome. Sequence constraints could arise from dCas13b targeting limitations, such as the PFS, or from ADAR sequence preferences(26). To investigate PFS constraints on REPAIRv1, we designed a plasmid library carrying a series of four randomized nucleotides at the 5′ end of a target site on the Cluc transcript (FIG. 51A). We targeted the center adenosine within either a UAG or AAC motif and found that for both motifs, all PFSs demonstrated detectable levels of RNA editing, with a majority of the PFSs having greater than 50% editing at the target site (FIG. 51B). Next, we sought to determine if the ADAR2_{DD} in REPAIRv1 had any sequence constraints immediately flanking the targeted base, as has been reported previously for ADAR2_{DD}(26).We tested every possible combination of 5′ and 3′ flanking nucleotides directly surrounding the target adenosine (FIG. 51C), and found that REPAIRv1 was capable of editing all motifs (FIG. 51D). Lastly, we analyzed whether the identity of the base opposite the target A in the spacer sequence affected editing efficiency and found that an A-C mismatch had the highest luciferase restoration with A-G, A-U, and A-A having drastically reduced REPAIRv1 activity (FIG. 57F, 70E).

### Correction of Disease-Relevant Human Mutations Using REPAIRv1

[1454] To demonstrate the broad applicability of the REPAIRv1 system for RNA editing in mammalian cells, we designed REPAIRv1 guides against two disease relevant mutations: 878G>A (AVPR2 W293X) in X-linked Nephrogenic diabetes insipidus and 1517G>A (FANCC W506X) in Fanconi anemia. We transfected expression constructs for cDNA of genes carrying these mutations into HEK293FT cells and tested whether REPAIRv1 could correct the mutations. Using guide RNAs containing 50-nt spacers, we were able to achieve 35% correction of AVPR2 and 23% correction of FANCC (FIG. 52A-D). We then tested the ability of REPAIRv1 to correct 34 different disease-relevant G>A mutations (Table 9) and found that we were able to achieve significant editing at 33 sites with up to 28% editing efficiency (FIG. 52E). The mutations we chose are only a fraction of the pathogenic G to A mutations (5,739) in the ClinVar database, which also includes an additional 11,943 G to A variants (FIG. 52F and FIG. 58). Because there are no sequence constraints, REPAIRv1 is capable of potentially editing all these disease relevant mutations, especially given that we observed significant editing regardless of the target motif (FIG. 51C and FIG. 52G).

[1455] Delivering the REPAIRv1 system to diseased cells is a prerequisite for therapeutic use, and we therefore sought to design REPAIRv1 constructs that could be packaged into therapeutically relevant viral vectors, such as adeno-associated viral (AAV) vectors. AAV vectors have a packaging limit of 4.7 kb, which cannot accommodate the large size of dCas13b-ADAR_{DD} (4473 bp) along with promoter and expression regulatory elements. To reduce the size, we tested a variety of N-terminal and C-terminal truncations of dCas13 fused to ADAR2_{DD}(E488Q) for RNA editing activity. We found that all C-terminal truncations tested were still functional and able to restore luciferase signal (FIG. 59), and the largest truncation, C-terminal Δ984-1090 (total size of the fusion protein 4,152 bp) was small enough to fit within the packaging limit of AAV vectors.

### Transcriptome-Wide Specificity of REPAIRv1

[1456] Although RNA knockdown with PspCas13b was highly specific, in our luciferase tiling experiments, we observed off-target adenosine editing within the guide:target duplex (FIG. 50E). To see if this was a widespread phenomenon, we tiled an endogenous transcript, KRAS, and measured the degree of off-target editing near the target adenosine (FIG. 53A). We found that for KRAS, while the on-target editing rate was 23%, there were many sites around the target site that also had detectable A to G edits (FIG. 53B).

[1457] Because of the observed off-target editing within the guide:target duplex, we evaluated all possible transcriptome off-targets by performing RNA sequencing on all mRNAs. RNA sequencing revealed that there was a significant number A to G off-target events, with 1,732 off-targets in the targeting condition and 925 off-targets in the non-targeting condition, with 828 off-targets overlapping (FIG. 53C,D). Of all the editing sites across the transcriptome, the on-target editing site had the highest editing rate, with 89% A to G conversion.

[1458] Given the high specificity of Cas13 targeting, we reasoned that the off-targets may arise from ADAR. We repeated the Cluc targeting experiment, this time comparing transcriptome changes for REPAIRv1 with a targeting guide, REPAIRv1 with a non-targeting guide, REPAIRv1 alone, or ADARDD(E488Q) alone (FIG. 71). We found differentially expressed genes and off-target editing events in each condition (FIG. 71,C). Interestingly, there was a high degree of overlap in the off-target editing events between ADARDD(E488Q) and all REPAIRv1 off-target edits, supporting the hypothesis that REPAIR off-target edits are driven by dCas13b-independent ADARDD(E488Q) editing events (FIG. 71).

[1459] Two RNA-guided ADAR systems have been described previously (FIG. 60A). The first utilizes a fusion of ADAR2_{DD} to the small viral protein lambda N ( [symbol] N), which binds to the BoxB- [symbol] RNA hairpin(22). A guide RNA with double BoxB- [symbol] hairpins guides ADAR2DD to edit sites encoded in the guide RNA(23). The second design utilizes full length ADAR2 (ADAR2) and a guide RNA with a hairpin that the double strand RNA binding domains (dsRBDs) of ADAR2 recognize(21, 24). We analyzed the editing efficiency of these two systems compared to REPAIRv1 and found that the BoxB-ADAR2 and ADAR2 systems demonstrated 63% and 36% editing rates, respectively, compared to the 89% editing rate achieved by REPAIRv1 (FIG. 60B-E). Additionally, the BoxB and ADAR2 systems created 2018 and 174 observed off targets, respectively, in the targeting guide conditions, compared to the 1,229 off targets in the REPAIRv1 targeting guide condition. Notably, all the conditions with the two ADAR2_{DD}-based systems (REPAIRv1 and BoxB) showed a high percentage of overlap in their off-targets while the ADAR2 system had a largely distinct set of off-targets (FIG. 60F). The overlap in off-targets between the targeting and non-targeting conditions and between REPAIRv1 and BoxB conditions suggest ADAR2_{DD} drove off-targets independent of dCas13 targeting (FIG. 60F).

### Improving Specificity of REPAIRv1 Through Rational Protein Engineering

[1460] To improve the specificity of REPAIR, we employed structure-guided protein engineering of ADAR2_{DD}(E488Q). Because of the guide-independent nature of off-targets, we hypothesized that destabilizing ADAR2_{DD}(E488Q)-RNA binding would selectively decrease off-target editing, but maintain on-target editing due to increased local concentration from dCas13b tethering of ADAR2_{DD}(E488Q) to the target site. We mutagenized ADAR2_{DD}(E488Q) residues previously determined to contact the duplex region of the target RNA (FIG. 54A)(18) on the ADAR2_{DD}(E488Q) background. To assess efficiency and specificity, we tested 17 single mutants with both targeting and non-targeting guides, under the assumption that background luciferase restoration in the non-targeting condition detected would be indicative of broader off-target activity. We found that mutations at the selected residues had significant effects on the luciferase activity for targeting and non-targeting guides (FIG. 54A,B, FIG. 61A). A majority of mutants either significantly improved the luciferase activity for the targeting guide or increased the ratio of targeting to non-targeting guide activity, which we termed the specificity score (FIG. 54A,B). We selected a subset of these mutants (FIG. 54B) for transcriptome-wide specificity profiling by next generation sequencing. As expected, off-targets measured from transcriptome-wide sequencing correlated with our specificity score (FIG. 61B) for mutants. We found that with the exception of ADAR2_{DD}(E488Q/R455E), all sequenced REPAIRv1 mutants could effectively edit the reporter transcript (FIG. 54C), with many mutants showing reduction in the number of off-targets (FIG. 61C, 62). We further explored the surrounding motifs of off-targets for specificity mutants, and found that REPAIRv1 and most of the engineered mutants exhibited a strong 3′ G preference for their edits, in agreement with the characterized ADAR2 motif (FIG. 63A)(28). We selected the mutant ADAR2_{DD}(E488Q/T375G) for future experiments, as it had the highest percent editing of the four mutants with the lowest numbers of transcriptome-wide off targets and termed it REPAIRv2. Compared to REPAIRv1, REPAIRv2 exhibited increased specificity, with a reduction from 18,385 to 20 transcriptome-wide off-targets by high-coverage sequencing (125× coverage, 10 ng DNA transfection) (FIG. 54D). In the region surrounding the targeted adenosine in Cluc, REPAIRv2 had reduced off-target editing, visible in sequencing traces (FIG. 54E). In motifs derived from next-generation sequencing, REPAIRv1 presented a strong preference towards 3′ G, but showed off-targeting edits for all motifs (FIG. 63B); by contrast, REPAIRv2 only edited the strongest off-target motifs (FIG. 63C). The distribution of edits on transcripts was heavily skewed, with highly-edited genes having over 60 edits (FIG. 64A,B), whereas REPAIRv2 only edited one transcript (EEF1A1) multiple times (FIG. 64D-F). REPAIRv1 off-target edits were predicted to result in numerous variants, including 1000 missense mutations (FIG. 64C) with 93 oncogenic events (FIG. 64D). In contrast, REPAIRv2 only had 6 missense mutations (FIG. 64E), none of which had oncogenic consequences (FIG. 64F). This reduction in predicted off-target effects distinguishes REPAIRv2 from other RNA editing approaches. Experiments with different dosages of guide RNA suggests that dose response may reduce off target activity (FIG. 68).

[1461] Analysis of the sequence surrounding off-target edits for REPAIRv1 or v2 did not reveal homology to guide sequences, suggesting that off-targets are likely dCas13b-independent (FIG. 72), consistent with the high overlap of off-targets between REPAIRv1 and the ADAR deaminase domain (FIG. 71D). To directly compare REPAIRv2 against other programmable ADAR systems, we repeated our Cluc targeting experiments with all systems at two different dosages of ADAR vector, finding that REPAIRv2 had comparable on-target editing to BoxB and ADAR2 but with significantly fewer off-target editing events at both dosages (FIG. 73). REPAIRv2 had enhanced specificity compared to REPAIRv1 at both dosages (FIG. 73B), a finding that also extended to two guides targeting distinct sites on PPIB (FIG. 74A-D). It is also worth noting that, in general, the lower dosage condition (10 ng) had fewer off-targets than the higher dosage condition (150 ng) (FIG. 70).

[1462] To assess editing specificity with greater sensitivity, we sequenced the low dosage condition (10 ng of transfected DNA) of REPAIRv1 and v2 at significantly higher sequencing depth (125× coverage of the transcriptome). Increased numbers of off-targets were found at higher sequencing depths corresponding to detection of rarer off-target events (FIG. 75). Furthermore, we speculated that different transcriptome states could also potentially alter the number of off-targeting events. Therefore, we tested REPAIRv2 activity in the osteosarcoma U2OS cell line, observing 6 and 7 off-targets for the targeting and non-targeting guide, respectively (FIG. 76).

[1463] Applicant targeted REPAIRv2 to endogenous genes to test if the specificity-enhancing mutations reduced nearby edits in target transcripts while maintaining high-efficiency on-target editing. For guides targeting either KRAS or PPIB, Applicant found that REPAIRv2 had no detectable off-target edits and could effectively edit the on-target adenosine at 27.1% and 13%, respectively (FIG. 54F,G). This specificity extended to additional target sites, including regions that demonstrate high-levels of background in non-targeting conditions for REPAIRv1, such as other KRAS or PPIB target sites (FIG. 65). Overall, REPAIRv2 eliminated off-targets in duplexed regions around the edited adenosine and showed dramatically enhanced transcriptome-wide specificity.

### Conclusion

[1464] Applicant has shown here that the RNA-guided RNA-targeting type VI-B effector Cas13b is capable of highly efficient and specific RNA knockdown, providing the basis for improved tools for interrogating essential genes and non-coding RNA as well as controlling cellular processes at the transcriptomic level. Catalytically inactive Cas13b (dCas13b) retains programmable RNA binding capability, which we leveraged here by fusing dCas13b to the adenosine deaminase ADAR2 to achieve precise A to I edits, a system we term REPAIRv1 (RNA Editing for Programmable A to I Replacement version 1). Further engineering of the system produced REPAIRv2, a method with comparable or increased activity relative to current editing platforms with dramatically improved specificity than previously described RNA editing platforms (25, 29) while maintaining high levels of on-target efficacy.

[1465] Although Cas13b exhibits high fidelity, Applicant's initial results with dCas13b-ADAR2_{DD} fusions revealed thousands of off-targets. To address this, Applicant employed a rational mutagenesis strategy to vary the ADAR2_{DD} residues that contact the RNA duplex, identifying a variant, ADAR2_{DD}(E488Q/T375G), capable of precise, efficient, and highly specific editing when fused to dCas13b. Editing efficiency with this variant was comparable to or better than that achieved with two currently available systems, BoxB-ADAR_{DD} or ADAR2 editing. Moreover, the REPAIRv2 system created only 10 observable off-targets in the whole transcriptome, at least an order of magnitude better than both alternative editing technologies. While it is possible that ADAR could deaminate adenosine bases on the DNA strand in RNA-DNA heteroduplexes (20), it is unlikely to do so in this case as Cas13b does not bind DNA efficiently and that REPAIR is cytoplasmically localized. Additionally, the lack of homology of off-target sites to the guide sequence and the strong overlap of off-targets with the ADAR_{DD}(E488Q)-only condition suggest that off-targets are not mediated by off-target guide binding. Deeper sequencing and novel inosine enrichment methods could further refine our understanding of REPAIR specificity in the future.

[1466] The REPAIR system offers many advantages compared to other nucleic acid editing tools. First, the exact target site can be encoded in the guide by placing a cytidine within the guide extension across from the desired adenosine to create a favorable A-C mismatch ideal for ADAR editing activity. Second, Cas13 has no targeting sequence constraints, such as a PFS or PAM, and no motif preference surrounding the target adenosine, allowing any adenosine in the transcriptome to be potentially targeted with the REPAIR system. We do note, however, that DNA base editors can target either the sense or anti-sense strand, while the REPAIR system is limited to transcribed sequences, thereby constraining the total number of possible editing sites we could target. However, due to the more flexible nature of targeting with REPAIR, this system can effect more edits within ClinVar (FIG. 52C) than Cas9-DNA base editors. Third, the REPAIR system directly deaminates target adenosines to inosines and does not rely on endogenous repair pathways, such as base-excision or mismatch repair, to generate desired editing outcomes. Thus, REPAIR should be possible in non-dividing cells that cannot support other forms of editing, such as in post-mitotic cells, such as in neurons. Fourth, RNA editing can be transient, allowing the potential for temporal control over editing outcomes. This property will likely be useful for treating diseases caused by temporary changes in cell state, such as local inflammation.

[1467] The REPAIR system provides multiple opportunities for additional engineering. Cas13b possesses pre-crRNA processing activity(13), allowing for multiplex editing of multiple variants, which alone might not alter disease risk, but together might have additive effects and disease-modifying potential. Extension of our rational design approach, such as combining promising mutations, could further increase the specificity and efficiency of the system, while unbiased screening approaches could identify additional residues for improving REPAIR activity and specificity.

[1468] Currently, the base conversions achievable by REPAIR are limited to generating inosine from adenosine; additional fusions of dCas13 with other catalytic RNA editing domains, such as APOBEC, could enable cytidine to uridine editing. Additionally, mutagenesis of ADAR could relax the substrate preference to target cytidine, allowing for the enhanced specificity conferred by the duplexed RNA substrate requirement to be exploited by C->U editors. Adenosine to inosine editing on DNA substrates may also be possible with catalytically inactive DNA-targeting CRISPR effectors, such as dCas9 or dCpf1, either through formation of DNA-RNA heteroduplex targets(20) or mutagenesis of the ADAR domain.

[1469] REPAIR could be applied towards a range of therapeutic indications where A to I (A to G) editing can reverse or slow disease progression (FIG. 66). First, expression of REPAIR for targeting causal, Mendelian G to A mutations in disease-relevant tissues could be used to revert deleterious mutations and treat disease. For example, stable REPAIR expression via AAV in brain tissue could be used to correct the GRIN2A missense mutation c.2191G>A (Asp731Asn) that causes focal epilepsy(28) or the APP missense mutation c.2149G>A (Val717Ile) causing early-onset Alzheimer's disease(29). Second, REPAIR could be used to treat disease by modifying the function of proteins involved in disease-related signal transduction. For instance, REPAIR editing would allow the re-coding of some serine, threonine and tyrosine residues that are the targets of kinases (FIG. 66). Phosphorylation of these residues in disease-relevant proteins affects disease progression for many disorders including Alzheimer's disease and multiple neurodegenerative conditions(30). Third, REPAIR could be used to change the sequence of expressed, risk-modifying G to A variants to pre-emptively decrease the chance of entering a disease state for patients. The most intriguing case are the ‘protective’ risk-modifying alleles, which dramatically decrease the chance of entering a disease state, and in some cases, confer additional health benefits. For instance, REPAIR could be used to functionally mimic A to G alleles of PCSK9 and IFIH1 that protect against cardiovascular disease and psoriatic arthritis(31, 39), respectively. Last, REPAIR can be used to therapeutically modify splice acceptor and donor sites for exon modulation therapies. REPAIR can change AU to IU or AA to Al, the functional equivalent of the consensus 5′ splice donor or 3′ splice acceptor sites respectively, creating new splice junctions. Additionally, REPAIR editing can mutate the consensus 3′ splice acceptor site from AG->IG to promote skipping of the adjacent downstream exon, a therapeutic strategy that has received significant interest for the treatment of DMD. Modulation of splice sites could have broad applications in diseases where anti-sense oligos have had some success, such as for modulation of SMN2 splicing for treatment of spinal muscular atrophy(32).

[1470] We have demonstrated the use of the PspCas13b enzyme as both an RNA knockdown and RNA editing tool. The dCas13b platform for programmable RNA binding has many applications, including live transcript imaging, splicing modification, targeted localization of transcripts, pull down of RNA-binding proteins, and epitranscriptomic modifications. Here, we used dCas13 to create REPAIR, adding to the existing suite of nucleic acid editing technologies. REPAIR provides a new approach for treating genetic disease or mimicking protective alleles, and establishes RNA editing as a useful tool for modifying genetic function.

TABLE 6
Cas13 Orthologs used in this study

| | Cas13 | | |
|---|---|---|---|
| Cas13 ID | abbreviation | Host Organism | Protein Accession |
| Cas13a1 | LshCas13a | Leptotrichia shahii | WP_018451595.1 |
| Cas13a2 | LwaCas13a | Leptotrichia wadei (Lw2) | WP_021746774.1 |
| Cas13a3 | LseCas13a | Listeria seeligeri | WP_012985477.1 |
| Cas13a4 | LbmCas13a | Lachnospiraceae bacterium | WP_044921188.1 |
| | | MA2020 | |
| Cas13a5 | LbnCas13a | Lachnospiraceae bacterium | WP_022785443.1 |
| | | NK4A179 | |
| Cas13a6 | CamCas13a | [Clostridium] aminophilum DSM | WP_031473346.1 |
| | | 10710 | |
| Cas13a7 | CgaCas13a | Carnobacterium gallinarum DSM | WP_034560163.1 |
| | | 4847 | |
| Cas13a8 | Cga2Cas13a | Carnobacterium gallinarum DSM | WP_034563842.1 |
| | | 4847 | |
| Cas13a9 | Pprcas13a | Paludibacter propionicigenes | WP_013443710.1 |
| | | WB4 | |
| Cas13a10 | LweCas13a | Listeria weihenstephanensis FSL | WP_036059185.1 |
| | | R9-0317 | |
| Cas13a11 | LbfCas13a | Listeriaceae bacterium FSL M6- | WP_036091002.1 |
| | | 0635 | |
| Cas13a12 | Lwa2Cas13a | Leptotrichia wadei F0279 | WP_021746774.1 |
| Cas13a13 | RcsCas13a | Rhodobacter capsulatus SB 1003 | WP_013067728.1 |
| Cas13a14 | RcrCas13a | Rhodobacter capsulatus R121 | WP_023911507.1 |
| Cas13a15 | RcdCas13a | Rhodobacter capsulatus DE442 | WP_023911507.1 |
| Cas13a16 | LbuCas13a | Leptotrichia buccalis C-1013-b | WP_015770004.1 |
| Cas13a17 | HheCas13a | Herbinix hemicellulosilytica | CRZ35554.1 |
| Cas13a18 | EreCas13a | [Eubacterium] rectale | WP_055061018.1 |
| Cas13a19 | EbaCas13a | Eubacteriaceae bacterium | WP_090127496.1 |
| | | CHKCI004 | |
| Cas13a20 | BmaCas13a | Blautia sp. Marseille-P2398 | WP_062808098.1 |
| Cas13a21 | LspCas13a | Leptotrichia sp. oral taxon 879 | WP_021744063.1 |
| | | str. F0557 | |
| Cas13b1 | BzoCas13b | Bergeyella zoohelcum | WP_002664492 |
| Cas13b2 | PinCas13b | Prevotella intermedia | WP_036860899 |
| Cas13b3 | PbuCas13b | Prevotella buccae | WP_004343973 |
| Cas13b4 | AspCas13b | Alistipes sp. ZOR0009 | WP_047447901 |
| Cas13b5 | PsmCas13b | Prevotella sp. MA2016 | WP_036929175 |
| Cas13b6 | RanCas13b | Riemerella anatipestifer | WP_004919755 |
| Cas13b7 | PauCas13b | Prevotella aurantiaca | WP_025000926 |
| Cas13b8 | PsaCas13b | Prevotella saccharolytica | WP_051522484 |
| Cas13b9 | Pin2Cas13b | Prevotella intermedia | WP_061868553 |
| Cas13b10 | CcaCas13b | Capnocytophaga canimorsus | WP_013997271 |
| Cas13b11 | PguCas13b | Porphyromonas gulae | WP_039434803 |
| Cas13b12 | PspCas13b | Prevotella sp. P5-125 | WP_044065294 |
| Cas13b13 | FbrCas13b | Flavobacterium branchiophilum | WP_014084666 |
| Cas13b14 | PgiCas13b | Porphyromonas gingivalis | WP_053444417 |
| Cas13b15 | Pin3Cas13b | Prevotella intermedia | WP_050955369 |
| Cas13c1 | FnsCas13c | Fusobacterium necrophorum | WP_005959231.1 |
| | | subsp. funduliforme ATCC | |
| | | 51357 contig00003 | |
| Cas13c2 | FndCas13c | Fusobacterium necrophorum DJ- | WP_035906563.1 |
| | | 2 contig0065, whole genome | |
| | | shotgun sequence | |
| Cas13c3 | FnbCas13c | Fusobacterium necrophorum | WP_035935671.1 |
| | | BFTR-1 contig0068 | |
| Cas13c4 | FnfCas13c | Fusobacterium necrophorum | EHO19081.1 |
| | | subsp. funduliforme 1_1_36S | |
| | | cont1.14 | |
| Cas13c5 | FpeCas13c | Fusobacterium perfoetens ATCC | WP_027128616.1 |
| | | 29250 | |
| | | T364DRAFT_scaffold00009.9_C | |
| Cas13c6 | FulCas13c | Fusobacterium ulcerans ATCC | WP_040490876.1 |
| | | 49185 cont2.38 | |
| Cas13c7 | AspCas13c | Anaerosalibacter sp. ND1 | WP_042678931.1 |
| | | genome assembly | |
| | | Anaerosalibacter massiliensis | |
| | | ND1 | |

TABLE 7
PFS cutoffs in bacterial screens

| | | −Log₂ depletion score used to |
|---|---|---|
| Cas13b ortholog | Key | generate PFS motif |
| Bergeyella zoohelcum | 1 | 2 |
| Prevotella intermedia locus 1 | 2 | 1 |
| Prevotella buccae | 3 | 3 |
| Alistipes sp. ZOR0009 | 4 | 1 |
| Prevotella sp. MA2016 | 5 | 2 |
| Riemerella anatipestifer | 6 | 4 |
| Prevotella aurantiaca | 7 | 1 |
| Prevotella saccharolytica | 8 | 0 |
| Prevotella intermedia locus 2 | 9 | 0 |
| Capnocytophaga canimorsus | 10 | 3 |
| Porphyromonas gulae | 11 | 4 |
| Prevotella sp. P5-125 | 12 | 2.1 |
| Flavobacterium | 13 | 1 |
| branchiophilum | | |
| Porphyromonas gingivalis | 14 | 3 |
| Prevotella intermedia locus 2 | 15 | 4 |

TABLE 8
dCas13b-ADAR linker sequences used in this
study for RNA editing in mammalian cells.

| FIG. | linker |
|---|---|
| 50C | GSGGGGS |
| 50E | GS |
| 57B | GSGGGGS |
| 57C | GS |
| 57D | GS |
| 57E: GS | GS |
| 57E: GSGGGGS | GSGGGGS |
| 57E: (GGGS)3 | GGGGSGGGGSGGGGS |
| 57E: Rigid | EAAAK |
| 57E: (GGS)6 | GGSGGSGGSGGSGGSGGS |
| 57E: XTEN | SGSETPGTSESATPES |
| 51B | GS |
| 57F | GS |
| 51C | GS |
| 52B | GS |
| 52D | GS |
| 52E | GS |
| 51A: Δ984-1090, | GS |
| Δ1026-1090, | |
| Δ1053-1090 | |
| 51A: Δ1-125, | GSGGGGS |
| Δ1-88, Δ1-72 | |
| 53B | GS |
| 53C | GS |
| 53D | GS |
| 60A | GS |
| 60C | GS |
| 60D | GS |
| 61D | GS |
| 54A | GS |
| 62A | GS |
| 54B | GS |
| 62B | GS |
| 62C | GS |
| 63A | GS |
| 63B | GS |
| 54C | GS |
| 54D | GS |
| 54E | GS |
| 54F | GS |
| 66A | GS |
| 66A | GS |

TABLE 9
Disease information for disease-relevant mutations

| | Gene | Disease |
|---|---|---|
| Full length candidates | | |
| NM_000054.4(AVPR2): c.878G > A | AVPR2 | Nephrogenic diabetes insipidus, |
| (p.Trp293Ter) | | X-linked |
| NM_000136.2(FANCC): c.1517G > A | FANCC | Fanconi anemia, |
| (p.Trp506Ter) | | complementation group C |
| Additional simulated candiates | | |
| Candidate | | |
| NM_000206.2(IL2RG): c.710G > A | IL2RG | X-linked severe combined |
| (p.Trp237Ter) | | immunodeficiency |
| NM_000132.3(F8): c.3144G > A | F8 | Hereditary factor VIII |
| (p.Trp1048Ter) | | deficiency disease |
| NM_000527.4(LDLR): c.1449G > A | LDLR | Familial hypercholesterolemia |
| (p.Trp483Ter) | | |
| NM_000071.2(CBS): c.162G > A | CBS | Homocystinuria due to CBS |
| (p.Trp54Ter) | | deficiency |
| NM_000518.4(HBB): c.114G > A | HBB | beta\hat{ }0\hat{ } Thalassemia\|beta |
| (p.Trp38Ter) | | Thalassemia |
| NM_000035.3(ALDOB): c.888G > A | ALDOB | Hereditary fructosuria |
| (p.Trp296Ter) | | |
| NM_004006.2(DMD): c.3747G > A | DMD | Duchenne muscular dystrophy |
| (p.Trp1249Ter) | | |
| NM_005359.5(SMAD4): c.906G > A | SMAD4 | Juvenile polyposis syndrome |
| (p.Trp302Ter) | | |
| NM_000059.3(BRCA2): c.582G > A | BRCA2 | Familial cancer of breast\|Breast- |
| (p.Trp194Ter) | | ovarian cancer, familial 2 |
| NM_000833.4(GRIN2A): c.3813G > A | GRIN2A | Epilepsy, focal, with speech |
| (p.Trp1271Ter) | | disorder and with or without |
| | | mental retardation |
| NM_002977.3(SCN9A): c.2691G > A | SCN9A | Indifference to pain, congenital, |
| (p.Trp897Ter) | | autosomal recessive |
| NM_007375.3(TARDBP): c.943G > A | TARDBP | Amyotrophic lateral sclerosis |
| (p.Ala315Thr) | | type 10 |
| NM_000492.3(CFTR): c.3846G > A | CFTR | Cystic fibrosis\|Hereditary |
| (p.Trp1282Ter) | | pancreatitis\|not |
| | | provided\|ataluren response - |
| | | Efficacy |
| NM_130838.1(UBE3A): c.2304G > A | UBE3A | Angelman syndrome |
| (p.Trp768Ter) | | |
| NM_000543.4(SMPD1): c.168G > A | SMPD1 | Niemann-Pick disease, type A |
| (p.Trp56Ter) | | |
| NM_206933.2(USH2A): c.9390G > A | USH2A | Usher syndrome, type 2A |
| (p.Trp3130Ter) | | |
| NM_130799.2(MEN1): c.1269G > A | MEN1 | Hereditary cancer-predisposing |
| (p.Trp423Ter) | | syndrome |
| NM_177965.3(C8orf37): c.555G > A | C8orf37 | Retinitis pigmentosa 64 |
| (p.Trp185Ter) | | |
| NM_000249.3(MLH1): c.1998G > A | MLH1 | Lynch syndrome |
| (p.Trp666Ter) | | |
| NM_000548.4(TSC2): c.2108G > A | TSC2 | Tuberous sclerosis 2\|Tuberous |
| (p.Trp703Ter) | | sclerosis syndrome |
| NM_000267.3(NF1): c.7044G > A | NF1 | Neurofibromatosis, type 1 |
| (p.Trp2348Ter) | | |
| NM_000179.2(MSH6): c.3020G > A | MSH6 | Lynch syndrome |
| (p.Trp1007Ter) | | |
| NM_000344.3(SMN1): c.305G > A | SMN1 | Spinal muscular atrophy, type |
| (p.Trp102Ter) | | II\|Kugelberg-Welander disease |
| NM_024577.3(SH3TC2): c.920G > A | SH3TC2 | Charcot-Marie-Tooth disease, |
| (p.Trp307Ter) | | type 4C |
| NM_001369.2(DNAH5): c.8465G > A | DNAH5 | Primary ciliary dyskinesia |
| (p.Trp2822Ter) | | |
| NM_004992.3(MECP2): c.311 G > A | MECP2 | Rett syndrome |
| (p.Trp104Ter) | | |
| NM_032119.3(ADGRV1): c.7406G > A | ADGRV1 | Usher syndrome, type 2C |
| (p.Trp2469Ter) | | |
| NM_017651.4(AHI1): c.2174G > A | AHI1 | Joubert syndrome 3 |
| (p.Trp725Ter) | | |
| NM_004562.2(PRKN): c.1358G > A | PRKN | Parkinson disease 2 |
| (p.Trp453Ter) | | |
| NM_000090.3(COL3A1): c.3833G > A | COL3A1 | Ehlers-Danlos syndrome, type 4 |
| (p.Trp1278Ter) | | |
| NM_007294.3(BRCA1): c.5511G > A | BRCA1 | Familial cancer of breast\|Breast- |
| (p.Trp1837Ter) | | ovarian cancer, familial 1 |
| NM_000256.3(MYBPC3): c.3293G > A | MYBPC3 | Primary familial hypertrophic |
| (p.Trp1098Ter) | | cardiomyopathy |
| NM_000038.5(APC): c.1262G > A | APC | Familial adenomatous polyposis |
| (p.Trp421Ter) | | 1 |
| NM_001204.6(BMPR2): c.893G > A | BMPR2 | Primary pulmonary |
| (p.W298*) | | hypertension |

TABLE 10
Key plasmids used in this study

| Plasmid | |
|---|---|
| name | Description |
| pAB0006 | CMV-Cluciferase-polyA EF1a-G-luciferase-poly A |
| pAB0040 | CMV-Cluciferase(STOP85)-polyA EF1a-G-luciferase- |
| | polyA |
| pAB0048 | pCDNA-ADAR2-N-terminal B12-HIV NES |
| pAB0050 | pAB0001-A02 (crRNA backbone) |
| pAB0051 | pAB0001-B06 (crRNA backbone) |
| pAB0052 | pAB0001-B11 (crRNA backbone) |
| pAB0053 | pAB0001-B12 (crRNA backbone) |
| pAB0014.B6 | EF1a-BsiWI-Cas13b6-NES-mapk |
| pAB0013.B11 | EF1a-BsiWI-Cas13b11-NES-HIV |
| pAB0013.B12 | EF1a-BsiWI-Cas13b12-NES-HIV |
| pAB0051 | pAB0001-B06 (crRNA backbone) |
| pAB0052 | pAB0001-B11 (crRNA backbone) |
| pAB0053 | pAB0001-B12 (crRNA backbone) |
| pAB0079 | pCDNA-ADAR1hu-EQmutant-N-terminal destination |
| | vector |
| pAB0085 | pCDNA-ADAR2 (E488Q)hu-EQmutant-N-terminal |
| | destination vector |
| pAB0095 | EF1a-BsiWI-Cas13-B12-NES-HIV, with double H |
| | HEPN mutant |
| pAB0114 | pCDNA-wtADAR2hu-EQmutant-N-terminal destination |
| | vector |
| pAB0120 | Luciferase ADAR guide optimal (guide 24 from |
| | wC0054) |
| pAB0122 | pAB0001-B12 NT guide for ADAR experiments |
| pAB0151 | pCDNA-ADAR2hu-EQmutant-N-terminal destination |
| | vector C-term delta 984-1090 |
| pAB0180 | T375G specificity mutant |
| pAB0181 | T375G Cas13b C-term delta 984-1090 |
| pAB0440 | CMV-dCas13b6-HIVNES-GS-dADAR2 |

TABLE 11
Guide/shRNA sequences used in this study for knockdown in mammalian cells

| | | Interference | | |
|---|---|---|---|---|
| Name | Spacer sequence | Mechanism | Notes | First FIG. |
| Bacterial | GCCAGCUUUCCGGGCA | Cas13b | Used for all | |
| PFS | UUGGCUUCCAUC | | orthologs | |
| guide | (SEQ ID No. 300) | | | |
| Cas13a- | GCCAGCUUUCCGGGCA | Cas13a | Used for all | FIG. 49B |
| Gluc | UUGGCUUCCAUC (SEQ | | Cas13a | |
| guide 1 | ID No. 301) | | orthologs | |
| Cas13a- | ACCCAGGAAUCUCAGG | Cas13a | Used for all | FIG. 49B |
| Gluc | AAUGUCGACGAU (SEQ | | Cas13a | |
| guide 2 | ID No. 302) | | orthologs | |
| Cas13a- | AGGGUUUUCCCAGUCA | Cas13a | Used for all | FIG. 49B |
| non- | CGACGUUGUAAA (SEQ | | Cas13a | |
| targeting | ID No. 303) | | orthologs | |
| guide | | | | |
| (LacZ) | | | | |
| Cas13b- | GGGCAUUGGCUUCCAU | Cas13b | Used for | FIG. 49B |
| Gluc | CUCUUUGAGCACCU | | orthologs 1-3, | |
| guide 1.1 | (SEQ ID No. 304) | | 6, 7, 10, 11, | |
| | | | 12, 14, 15 | |
| Cas13b- | GUGCAGCCAGCUUUCC | Cas13b | Used for | FIG. 49B |
| Gluc | GGGCAUUGGCUUCC | | ortholog 4 | |
| guide 1.2 | (SEQ ID No. 305) | | | |
| Cas13b- | GCAGCCAGCUUUCCGG | Cas13b | Used for | FIG. 49B |
| Gluc | GCAUUGGCUUCCAU | | ortholog 5 | |
| guide 1.3 | (SEQ ID No. 306) | | | |
| Cas13b- | GGCUUCCAUCUCUUUG | Cas13b | Used for | FIG. 49B |
| Gluc | AGCACCUCCAGCGG | | ortholog 8, 9 | |
| guide 1.4 | (SEQ ID No. 307) | | | |
| Cas13b- | GGAAUGUCGACGAUCG | Cas13b | Used for | FIG. 49B |
| Glue | CCUCGCCUAUGCCG | | ortholog 13 | |
| guide 1.5 | (SEQ ID No. 308) | | | |
| Cas13b- | GAAUGUCGACGAUCGC | Cas13b | Used for | FIG. 49B |
| Glue | CUCGCCUAUGCCGC | | orthologs 1-3, | |
| guide 2.1 | (SEQ ID No. 309) | | 6, 7, 10, 11, | |
| | | | 14, 15 | |
| Cas13b- | GACCUGUGCGAUGAAC | Cas13b | Used for | FIG. 49B |
| Glue | UGCUCCAUGGGCUC | | ortholog 12 | |
| guide 2.2 | (SEQ ID No. 310) | | | |
| Cas13b- | GUGUGGCAGCGUCCUG | Cas13b | Used for | FIG. 49B |
| Glue | GGAUGAACUUCUUC | | ortholog 4 | |
| guide 2.2 | (SEQ ID No. 311) | | | |
| Cas13b- | GUGGCAGCGUCCUGGG | Cas13b | Used for | FIG. 49B |
| Glue | AUGAACUUCUUCAU | | ortholog 5 | |
| guide 2.3 | (SEQ ID No. 312) | | | |
| Cas13b- | GCUUCUUGCCGGGCAA | Cas13b | Used for | FIG. 49B |
| Glue | CUUCCCGCGGUCAG | | ortholog 8, 9 | |
| guide 2.4 | (SEQ ID No. 313) | | | |
| Cas13b- | GCAGGGUUUUCCCAGU | Cas13b | Used for | FIG. 49B |
| Glue | CACGACGUUGUAAAA | | ortholog 13 | |
| guide 2.6 | (SEQ ID No. 314) | | | |
| Cas13b- | GCAGGGUUUUCCCAGU | Cas13b | Used for all | FIG. 49B |
| non | CACGACGUUGUAAAA | | orthologs | |
| targeting | (SEQ ID No. 315) | | | |
| guide | | | | |
| Cas13a- | ACCCAGGAAUCUCAGG | Cas13a | | FIG. 49E |
| Glue | AAUGUCGACGAU (SEQ | | | |
| guide- | ID No. 316) | | | |
| RNASeq | | | | |
| shRNA- | CAGCUUUCCGGGCAUU | shRNA | | FIG. 49F |
| Glue | GGCUU (SEQ ID No. 317) | | | |
| guide | | | | |
| Cas13b- | CCGCUGGAGGUGCUCA | Cas13b | | FIG. 49F |
| Glue | AAGAGAUGGAAGCC | | | |
| guide- | (SEQ ID No. 318) | | | |
| RNASeq | | | | |
| Cas13a- | GCCAGCUUUCCGGGCA | Cas13a | | FIG. 56A |
| Glue- | UUGGCUUCCAUC (SEQ | | | |
| guide-1 | ID No. 319) | | | |
| Cas13a- | ACCCAGGAAUCUCAGG | Cas13a | | FIG. 56A |
| Glue- | AAUGUCGACGAU (SEQ | | | |
| guide-2 | ID No. 320) | | | |
| Cas13b- | GGGCAUUGGCUUCCAU | Cas13b | | FIG. 56A |
| Glue- | CUCUUUGAGCACCU | | | |
| opt- | (SEQ ID No. 321) | | | |
| guide-1 | | | | |
| Cas13b- | GAAUGUCGACGAUCGC | Cas13b | | FIG. 56A |
| Glue- | CUCGCCUAUGCCGC | | | |
| opt- | (SEQ ID No. 322) | | | |
| guide-2 | | | | |
| Cas13a | CAAGGCACUCUUGCCU | Cas13a | | FIG. 56B |
| KRAS | ACGCCACCAGCU (SEQ | | | |
| guide 1 | ID No. 323) | | | |
| Cas13a | UCAUAUUCGUCCACAA | Cas13a | | FIG. 56B |
| KRAS | AAUGAUUCUGAA (SEQ | | | |
| guide 2 | ID No. 324) | | | |
| Cas13a | AUUAUUUAUGGCAAAU | Cas13a | | FIG. 56B |
| KRAS | ACACAAAGAAAG (SEQ | | | |
| guide 3 | ID No. 325) | | | |
| Cas13a | GAAUAUCUUCAAAUGA | Cas13a | | FIG. 56B |
| KRAS | UUUAGUAUUAUU (SEQ | | | |
| guide 4 | ID No. 326) | | | |
| Cas13a | ACCAUAGGUACAUCUU | Cas13a | | FIG. 56B |
| KRAS | CAGAGUCCUUAA (SEQ | | | |
| guide 5 | ID No. 327) | | | |
| Cas13b | GUCAAGGCACUCUUGC | Cas13b | | FIG. 56B |
| KRAS | CUACGCCACCAGCU | | | |
| guide 1 | (SEQ ID No. 328) | | | |
| Cas13b | GAUCAUAUUCGUCCAC | Cas13b | | FIG. 56B |
| KRAS | AAAAUGAUUCUGAA | | | |
| guide 2 | (SEQ ID No. 329) | | | |
| Cas13b | GUAUUAUUUAUGGCAA | Cas13b | | FIG. 56B |
| KRAS | AUACACAAAGAAAG | | | |
| guide 3 | (SEQ ID No. 330) | | | |
| Cas13b | GUGAAUAUCUUCAAAU | Cas13b | | FIG. 56B |
| KRAS | GAUUUAGUAUUAUU | | | |
| guide 4 | (SEQ ID No. 331) | | | |
| Cas13b | GGACCAUAGGUACAUC | Cas13b | | FIG. 56B |
| KRAS | UUCAGAGUCCUUAA | | | |
| guide 5 | (SEQ ID No. 332) | | | |
| shRNA | aagagtgccttgacgatacagcCUC | shRNA | | FIG. 56B |
| KRAS | GAGgctgtatcgtcaaggcactat | | | |
| guide 1 | (SEQ ID No. 333) | | | |
| shRNA | aatcattttgtggacgaatatCUCG | shRNA | | FIG. 56B |
| KRAS | AGatattcgtccacaaaatgatt | | | |
| guide 2 | (SEQ ID No. 334) | | | |
| shRNA | aaataatactaaatcatttgaCUCG | shRNA | | FIG. 56B |
| KRAS | AGtcaaatgatttagtattattt | | | |
| guide 3 | (SEQ ID No. 335) | | | |
| shRNA | aataatactaaatcatttgaaCUCG | shRNA | | FIG. 56B |
| KRAS | AGttcaaatgatttagtattatt | | | |
| guide 4 | (SEQ ID No. 336) | | | |
| shRNA | aaggactctgaagatgtacctCUC | shRNA | | FIG. 56B |
| KRAS | GAGaggtacatcttcagagtectt | | | |
| guide 5 | (SEQ ID No. 337) | | | |

TABLE 12
Guide sequences used for Gluc knockdown

First

| Name | Spacer sequence | Position | Notes | FIG. |
|---|---|---|---|---|
| Glue tiling | GAGAUCAGGGCAAA | 2 | Note that the Cas13a | 49C |
| guide 1 | CAGAACUUUGACUC | | spacers are truncated by | |
| | CC | | two nucleotides at the 5' | |
| | (SEQ ID No. 338) | | end | |
| Glue tiling | GGAUGCAGAUCAGG | 7 | Note that the Cas13a | 49C |
| guide 2 | GCAAACAGAACUUU | | spacers are truncated by | |
| | GA | | two nucleotides at the 5' | |
| | (SEQ ID No. 339) | | end | |
| Glue tiling | GCACAGCGAUGCAG | 13 | Note that the Cas13a | 49C |
| guide 3 | AUCAGGGCAAACAG | | spacers are truncated by | |
| | AA | | two nucleotides at the 5' | |
| | (SEQ ID No. 340) | | end | |
| Glue tiling | GCUCGGCCACAGCG | 19 | Note that the Cas13a | 49C |
| guide 4 | AUGCAGAUCAGGGC | | spacers are truncated by | |
| | AA | | two nucleotides at the 5' | |
| | (SEQ ID No. 341) | | end | |
| Glue tiling | GGGGCUUGGCCUCG | 28 | Note that the Cas13a | 49C |
| guide 5 | GCCACAGCGAUGCA | | spacers are truncated by | |
| | GA | | two nucleotides at the 5' | |
| | (SEQ ID No. 342) | | end | |
| Glue tiling | GUGGGCUUGGCCUC | 29 | Note that the Cas13a | 49C |
| guide 6 | GGCCACAGCGAUGC | | spacers are truncated by | |
| | AG | | two nucleotides at the 5' | |
| | (SEQ ID No. 343) | | end | |
| Glue tiling | GUCUCGGUGGGCUU | 35 | Note that the Cas13a | 49C |
| guide 7 | GGCCUCGGCCACAG | | spacers are truncated by | |
| | CG | | two nucleotides at the 5' | |
| | (SEQ ID No. 344) | | end | |
| Glue tiling | GUUCGUUGUUCUCG | 43 | Note that the Cas13a | 49C |
| guide 8 | GUGGGCUUGGCCUC | | spacers are truncated by | |
| | GG | | two nucleotides at the 5' | |
| | (SEQ ID No. 345) | | end | |
| Glue tiling | GGAAGUCUUCGUUG | 49 | Note that the Cas13a | 49C |
| guide 9 | UUCUCGGUGGGCUU | | spacers are truncated by | |
| | GG | | two nucleotides at the 5' | |
| | (SEQ ID No. 346) | | end | |
| Glue tiling | GAUGUUGAAGUCUU | 54 | Note that the Cas13a | 49C |
| guide 10 | CGUUGUUCUCGGUG | | spacers are truncated by | |
| | GG | | two nucleotides at the 5' | |
| | (SEQ ID No. 347) | | end | |
| Glue tiling | GCGGCCACGAUGUU | 62 | Note that the Cas13a | 49C |
| guide 11 | GAAGUCUUCGUUGU | | spacers are truncated by | |
| | UC | | two nucleotides at the 5' | |
| | (SEQ ID No. 348) | | end | |
| Glue tiling | GUGGCCACGGCCAC | 68 | Note that the Cas13a | 49C |
| guide 12 | GAUGUUGAAGUCUU | | spacers are truncated by | |
| | CG | | two nucleotides at the 5' | |
| | (SEQ ID No. 349) | | end | |
| Glue tiling | GGUUGCUGGCCACG | 73 | Note that the Cas13a | 49C |
| guide 13 | GCCACGAUGUUGAA | | spacers are truncated by | |
| | GU | | two nucleotides at the 5' | |
| | (SEQ ID No. 350) | | end | |
| Glue tiling | GUCGCGAAGUUGCU | 80 | Note that the Cas13a | 49C |
| guide 14 | GGCCACGGCCACGA | | spacers are truncated by | |
| | UG | | two nucleotides at the 5' | |
| | (SEQ ID No. 351) | | end | |
| Glue tiling | GCCGUGGUCGCGAA | 86 | Note that the Cas13a | 49C |
| guide 15 | GUUGCUGGCCACGG | | spacers are truncated by | |
| | CC | | two nucleotides at the 5' | |
| | (SEQ ID No. 352) | | end | |
| Glue tiling | GCGAGAUCCGUGGU | 92 | Note that the Cas13a | 49C |
| guide 16 | CGCGAAGUUGCUGG | | spacers are truncated by | |
| | CC | | two nucleotides at the 5' | |
| | (SEQ ID No. 353) | | end | |
| Glue tiling | GCAGCAUCGAGAUC | 98 | Note that the Cas13a | 49C |
| guide 17 | CGUGGUCGCGAAGU | | spacers are truncated by | |
| | UG | | two nucleotides at the 5' | |
| | (SEQ ID No. 354) | | end | |
| Glue tiling | GGGUCAGCAUCGAG | 101 | Note that the Cas13a | 49C |
| guide 18 | AUCCGUGGUCGCGA | | spacers are truncated by | |
| | AG | | two nucleotides at the 5' | |
| | (SEQ ID No. 355) | | end | |
| Glue tiling | GCUUCCCGCGGUCA | 109 | Note that the Cas13a | 49C |
| guide 19 | GCAUCGAGAUCCGU | | spacers are truncated by | |
| | GG | | two nucleotides at the 5' | |
| | (SEQ ID No. 356) | | end | |
| Glue tiling | GGGGCAACUUCCCG | 115 | Note that the Cas13a | 49C |
| guide 20 | CGGUCAGCAUCGAG | | spacers are truncated by | |
| | AU | | two nucleotides at the 5' | |
| | (SEQ ID No. 357) | | end | |
| Glue tiling | GUCUUGCCGGGCAA | 122 | Note that the Cas13a | 49C |
| guide 21 | CUUCCCGCGGUCAG | | spacers are truncated by | |
| | CA | | two nucleotides at the 5' | |
| | (SEQ ID No. 358) | | end | |
| Glue tiling | GGCAGCUUCUUGCC | 128 | Note that the Cas13a | 49C |
| guide 22 | GGGCAACUUCCCGC | | spacers are truncated by | |
| | GG | | two nucleotides at the 5' | |
| | (SEQ ID No. 359) | | end | |
| Glue tiling | GCCAGCGGCAGCUU | 134 | Note that the Cas13a | 49C |
| guide 23 | CUUGCCGGGCAACU | | spacers are truncated by | |
| | UC | | two nucleotides at the 5' | |
| | (SEQ ID No. 360) | | end | |
| Glue tiling | GUGAUGUGGGACAG | 212 | Note that the Cas13a | 49C |
| guide 36 | GCAGAUCAGACAGC | | spacers are truncated by | |
| | CC | | two nucleotides at the 5' | |
| | (SEQ ID No. 373) | | end | |
| Glue tiling | GACUUGAUGUGGGA | 215 | Note that the Cas | 49C |
| guide 37 | CAGGCAGAUCAGAC | | spacers are truncated by | |
| | AG | | two nucleotides at the 5' | |
| | (SEQ ID No. 374) | | end | |
| Glue tiling | GGGGCGUGCACUUG | 223 | Note that the Cas13a | 49C |
| guide 38 | AUGUGGGACAGGCA | | spacers are truncated by | |
| | GA | | two nucleotides at the 5' | |
| | (SEQ ID No. 375) | | end | |
| Glue tiling | GCUUCAUCUUGGGC | 232 | Note that the Cas13a | 49C |
| guide 39 | GUGCACUUGAUGUG | | spacers are truncated by | |
| | GG | | two nucleotides at the 5' | |
| | (SEQ ID No. 376) | | end | |
| Glue tiling | GUGAACUUCUUCAU | 239 | Note that the Cas13a | 49C |
| guide 40 | CUUGGGCGUGCACU | | spacers are truncated by | |
| | UG | | two nucleotides at the 5' | |
| | (SEQ ID No. 377) | | end | |
| Glue tiling | GGGAUGAACUUCUU | 242 | Note that the Cas13a | 49C |
| guide 41 | CAUCUUGGGCGUGC | | spacers are truncated by | |
| | AC | | two nucleotides at the 5' | |
| | (SEQ ID No. 378) | | end | |
| Glue tiling | GUGGGAUGAACUUC | 244 | Note that the Cas13a | 49C |
| guide 42 | UUCAUCUUGGGCGU | | spacers are truncated by | |
| | GC | | two nucleotides at the 5' | |
| | (SEQ ID No. 379) | | end | |
| Glue tiling | GGGCAGCGUCCUGG | 254 | Note that the Cas13a | 49C |
| guide 43 | GAUGAACUUCUUCA | | spacers are truncated by | |
| | UC | | two nucleotides at the 5' | |
| | (SEQ ID No. 380) | | end | |
| Glue tiling | GGGUGUGGCAGCGU | 259 | Note that the Cas13a | 49C |
| guide 44 | CCUGGGAUGAACUU | | spacers are truncated by | |
| | CU | | two nucleotides at the 5' | |
| | (SEQ ID No. 381) | | end | |
| Glue tiling | GUUCGUAGGUGUGG | 265 | Note that the Cas13a | 49C |
| guide 45 | CAGCGUCCUGGGAU | | spacers are truncated by | |
| | GA | | two nucleotides at the 5' | |
| | (SEQ ID No. 382) | | end | |
| Glue tiling | GCGCCUUCGUAGGU | 269 | Note that the Cas13a | 49C |
| guide 46 | GUGGCAGCGUCCUG | | spacers are truncated by | |
| | GG | | two nucleotides at the 5' | |
| | (SEQ ID No. 383) | | end | |
| Glue tiling | GUCUUUGUCGCCUU | 276 | Note that the Cas13a | 49C |
| guide 47 | CGUAGGUGUGGCAG | | spacers are truncated by | |
| | CG | | two nucleotides at the 5' | |
| | (SEQ ID No. 384) | | end | |

| | | | | |
|---|---|---|---|---|
| Glue tiling | GCUUUGUCGCCUUC | 275 | Note that the Cas13a | 49C |
| guide 48 | GUAGGUGUGGCAGC | | spacers are truncated by | |
| | GU | | two nucleotides at the 5' | |
| | (SEQ ID No. 385) | | end | |
| Glue tiling | GUGCCGCCCUGUGC | 293 | Note that the Cas13a | 49C |
| guide 49 | GGACUCUUUGUCGC | | spacers are truncated by | |
| | CU | | two nucleotides at the 5' | |
| | (SEQ ID No. 386) | | end | |
| Glue tiling | GUAUGCCGCCCUGU | 295 | Note that the Cas13a | 49C |
| guide 50 | GC GGACUCUUUGUC | | spacers are truncated by | |
| | GC | | two nucleotides at the 5' | |
| | (SEQ ID No. 387) | | end | |
| Glue tiling | GCCUCGCCUAUGCC | 302 | Note that the Cas13a | 49C |
| guide 51 | GCCCUGUGCGGACU | | spacers are truncated by | |
| | CU | | two nucleotides at the 5' | |
| | (SEQ ID No. 388) | | end | |
| Glue tiling | GGAUCGCCUCGCCU | 307 | Note that the Cas13a | 49C |
| guide 52 | AUGCCGCCCUGUGC | | spacers are truncated by | |
| | GG | | two nucleotides at the 5' | |
| | (SEQ ID No. 389) | | end | |
| Glue tiling | GAUGUCGACGAUCG | 315 | Note that the Cas13a | 49C |
| guide 53 | CCUCGCCUAUGCCG | | spacers are truncated by | |
| | CC | | two nucleotides at the 5' | |
| | (SEQ ID No. 390) | | end | |
| Glue tiling | GCAGGAAUGUCGAC | 320 | Note that the Cas13a | 49C |
| guide 54 | GAUCGCCUCGCCUA | | spacers are truncated by | |
| | UG | | two nucleotides at the 5' | |
| | (SEQ ID No. 391) | | end | |
| Glue tiling | GAAUCUCAGGAAUG | 325 | Note that the Cas13a | 49C |
| guide 55 | UCGACGAUCGCCUC | | spacers are truncated by | |
| | GC | | two nucleotides at the 5' | |
| | (SEQ ID No. 392) | | end | |
| Glue tiling | GCCCAGGAAUCUCA | 331 | Note that the Cas13a | 49C |
| guide 56 | GGAAUGUCGACGAU | | spacers are truncated by | |
| | CG | | two nucleotides at the 5' | |
| | (SEQ ID No. 393) | | end | |
| Glue tiling | GCCUUGAACCCAGG | 338 | Note that the Cas13a | 49C |
| guide 57 | AAUCUCAGGAAUGU | | spacers are truncated by | |
| | CG | | two nucleotides at the 5' | |
| | (SEQ ID No. 394) | | end | |
| Glue tiling | GCCAAGUCCUUGAA | 344 | Note that the Cas13a | 49C |
| guide 58 | CCCAGGAAUCUCAG | | spacers are truncated by | |
| | GA | | two nucleotides at the 5' | |
| | (SEQ ID No. 395) | | end | |
| Glue tiling | GUGGGCUCCAAGUC | 350 | Note that the Cas13a | 49C |
| guide 59 | CUUGAACCCAGGAA | | spacers are truncated by | |
| | UC | | two nucleotides at the 5' | |
| | (SEQ ID No. 396) | | end | |
| Glue tiling | GCCAUGGGCUCCAA | 353 | Note that the Cas13a | 49C |
| guide 60 | GUCCUUGAACCCAG | | spacers are truncated by | |
| | GA | | two nucleotides at the 5' | |
| | (SEQ ID No. 397) | | end | |
| Glue tiling | GGAACUGCUCCAUG | 361 | Note that the Cas13a | 49C |
| guide 61 | GGCUCCAAGUCCUU | | spacers are truncated by | |
| | GA | | two nucleotides at the 5' | |
| | (SEQ ID No. 398) | | end | |
| Glue tiling | GUGCGAUGAACUGC | 367 | Note that the Cas13a | 49C |
| guide 62 | UCCAUGGGCUCCAA | | spacers are truncated by | |
| | GU | | two nucleotides at the 5' | |
| | (SEQ ID No. 399) | | end | |
| Glue tiling | GGACCUGUGCGAUG | 373 | Note that the Cas13a | 49C |
| guide 63 | AACUGCUCCAUGGG | | spacers are truncated by | |
| | CU | | two nucleotides at the 5' | |
| | (SEQ ID No. 400) | | end | |
| Glue tiling | GACAGAUCGACCUG | 380 | Note that the Cas13a | 49C |
| guide 64 | UGCGAUGAACUGCU | | spacers are truncated by | |
| | CC | | two nucleotides at the 5' | |
| | (SEQ ID No. 401) | | end | |
| Glue tiling | GACACACAGAUCGA | 384 | Note that the Cas13a | 49C |
| guide 65 | CCUGUGCGAUGAAC | | spacers are truncated by | |
| | UG | | two nucleotides at the 5' | |
| | (SEQ ID No. 402) | | end | |
| Glue tiling | GUGCAGUCCACACA | 392 | Note that the Cas13a | 49C |
| guide 66 | CAGAUCGACCUGUG | | spacers are truncated by | |
| | CG | | two nucleotides at the 5' | |
| | (SEQ ID No. 403) | | end | |
| Glue tiling | GCCAGUUGUGCAGU | 399 | Note that the Cas13a | 49C |
| guide 67 | CCACACACAGAUCG | | spacers are truncated by | |
| | AC | | two nucleotides at the 5' | |
| | (SEQ ID No. 404) | | end | |
| Glue tiling | GGGCAGCCAGUUGU | 404 | Note that the Cas13a | 49C |
| guide 68 | GCAGUCCACACACA | | spacers are truncated by | |
| | GA | | two nucleotides at the 5' | |
| | (SEQ ID No. 405) | | end | |
| Glue tiling | GUUUGAGGCAGCCA | 409 | Note that the Cas13a | 49C |
| guide 69 | GUUGUGCAGUCCAC | | spacers are truncated by | |
| | AC | | two nucleotides at the 5' | |
| | (SEQ ID No. 406) | | end | |
| Glue tiling | GAAGCCCUUUGAGG | 415 | Note that the Cas13a | 49C |
| guide 70 | CAGCCAGUUGUGCA | | spacers are truncated by | |
| | GU | | two nucleotides at the 5' | |
| | (SEQ ID No. 407) | | end | |
| Glue tiling | GCACGUUGGCAAGC | 424 | Note that the Cas13a | 49C |
| guide 71 | CCUUUGAGGCAGCC | | spacers are truncated by | |
| | AG | | two nucleotides at the 5' | |
| | (SEQ ID No. 408) | | end | |
| Glue tiling | GACUGCACGUUGGC | 428 | Note that the Cas13a | 49C |
| guide 72 | AAGCCCUUUGAGGC | | spacers are truncated by | |
| | AG | | two nucleotides at the 5' | |
| | (SEQ ID No. 409) | | end | |
| Glue tiling | GGGUCAGAACACUG | 437 | Note that the Cas13a | 49C |
| guide 73 | CACGUUGGCAAGCC | | spacers are truncated by | |
| | CU | | two nucleotides at the 5' | |
| | (SEQ ID No. 410) | | end | |
| Glue tiling | GCAGGUCAGAACAC | 439 | Note that the Cas13a | 49C |
| guide 74 | UGCACGUUGGCAAG | | spacers are truncated by | |
| | CC | | two nucleotides at the 5' | |
| | (SEQ ID No. 411) | | end | |
| Glue tiling | GAGCAGGUCAGAAC | 441 | Note that the Cas13a | 49C |
| guide 75 | ACUGCACGUUGGCA | | spacers are truncated by | |
| | AG | | two nucleotides at the 5' | |
| | (SEQ ID No. 412) | | end | |
| Glue tiling | GGCCACUUCUUGAG | 452 | Note that the Cas13a | 49C |
| guide 76 | CAGGUCAGAACACU | | spacers are truncated by | |
| | GC | | two nucleotides at the 5' | |
| | (SEQ ID No. 413) | | end | |
| Glue tiling | GCGGCAGCCACUUC | 457 | Note that the Cas13a | 49C |
| guide 77 | UUGAGCAGGUCAGA | | spacers are truncated by | |
| | AC | | two nucleotides at the 5' | |
| | (SEQ ID No. 414) | | end | |
| Glue tiling | GUGCGGCAGCCACU | 459 | Note that the Cas13a | 49C |
| guide 78 | UCUUGAGCAGGUCA | | spacers are truncated by | |
| | GA | | two nucleotides at the 5' | |
| | (SEQ ID No. 415) | | end | |
| Glue tiling | GAGCGUUGCGGCAG | 464 | Note that the Cas13a | 49C |
| guide 79 | CCACUUCUUGAGCA | | spacers are truncated by | |
| | GG | | two nucleotides at the 5' | |
| | (SEQ ID No. 416) | | end | |
| Glue tiling | GAAAGGUCGCACAG | 475 | Note that the Cas13a | 49C |
| guide 80 | CGUUGCGGCAGCCA | | spacers are truncated by | |
| CU | | | two nucleotides at the 5' | |
| (SEQ ID No. 417) | | | end | |
| Glue tiling | GCUGGCAAAGGUCG | 480 | Note that the Cas13a | 49C |
| guide 81 | CACAGCGUUGCGGC | | spacers are truncated by | |
| | AG | | two nucleotides at the 5' | |
| | (SEQ ID No. 418) | | end | |
| Glue tiling | GGGCAAAGGUCGCA | 478 | Note that the Cas13a | 49C |
| guide 82 | CAGCGUUGCGGCAG | | spacers are truncated by | |
| | CC | | two nucleotides at the 5' | |
| | (SEQ ID No. 419) | | end | |
| Glue tiling | GUGGAUCUUGCUGG | 489 | Note that the Cas13a | 49C |
| guide 83 | CAAAGGUCGCACAG | | spacers are truncated by | |
| | CG | | two nucleotides at the 5' | |
| | (SEQ ID No. 420) | | end | |
| Glue tiling | GCACCUGGCCCUGG | 499 | Note that the Cas13a | 49C |
| guide 84 | AUCUUGCUGGCAAA | | spacers are truncated by | |
| | GG | | two nucleotides at the 5' | |
| | (SEQ ID No. 421) | | end | |
| Glue tiling | GUGGCCCUGGAUCU | 495 | Note that the Cas13a | 49C |
| guide 85 | UGCUGGCAAAGGUC | | spacers are truncated by | |
| | GC | | two nucleotides at the 5' | |
| | (SEQ ID No. 422) | | end | |
| Glue tiling | GUGAUCUUGUCCAC | 509 | Note that the Cas13a | 49C |
| guide 86 | CUGGCCCUGGAUCU | | spacers are truncated by | |
| | UG | | two nucleotides at the 5' | |
| | (SEQ ID No. 423) | | end | |
| Glue tiling | GCCCCUUGAUCUUG | 514 | Note that the Cas13a | 49C |
| guide 87 | UCCACCUGGCCCUG | | spacers are truncated by | |
| | GA | | two nucleotides at the 5' | |
| | (SEQ ID No. 424) | | end | |
| Glue tiling | GCCCUUGAUCUUGU | 513 | Note that the Cas13a | 49C |
| guide 88 | CCACCUGGCCCUGG | | spacers are truncated by | |
| | AU | | two nucleotides at the 5' | |
| | (SEQ ID No. 425) | | end | |
| Glue tiling | GCCUUGAUCUUGUC | 512 | Note that the Cas13a | 49C |
| guide 89 | CACCUGGCCCUGGA | | spacers are truncated by | |
| | UC | | two nucleotides at the 5' | |
| | (SEQ ID No. 426) | | end | |
| Glue tiling | GGCAAAGGUCGCAC | 477 | Note that the Cas13a | 49C |
| guide 90 | AGCGUUGCGGCAGC | | spacers are truncated by | |
| | CA | | two nucleotides at the 5' | |
| | (SEQ ID No. 427) | | end | |
| Glue tiling | GCAAAGGUCGCACA | 476 | Note that the Cas13a | 49C |
| guide 91 | GCGUUGCGGCAGCC | | spacers are truncated by | |
| | AC | | two nucleotides at the 5' | |
| | (SEQ ID No. 428) | | end | |
| Glue tiling | GAAGGUCGCACAGC | 474 | Note that the Cas13a | 49C |
| guide 92 | GUUGCGGCAGCCAC | | spacers are truncated by | |
| | UU | | two nucleotides at the 5' | |
| | (SEQ ID No. 429) | | end | |
| Glue tiling | GAGGUCGCACAGCG | 473 | Note that the Cas13a | 49C |
| guide 93 | UUGCGGCAGCCACU | | spacers are truncated by | |
| | UC | | two nucleotides at the 5' | |
| | (SEQ ID No. 430) | | end | |
| Non- | GGUAAUGCCUGGCU | N/A | Note that the Cas13a | 49C |
| targeting | UGUCGACGCAUAGU | | spacers are truncated by | |
| guide 1 | CUG | | two nucleotides at the 5' | |
| | (SEQ ID No. 431) | | end | |
| Non- | GGGAACCUUGGCCG | N/A | Note that the Cas13a | 49C |
| targeting | UUAUAAAGUCUGAC | | spacers are truncated by | |
| guide 2 | CAG | | two nucleotides at the 5' | |
| | (SEQ ID No. 432) | | end | |
| Non- | GGAGGGUGAGAAUU | N/A | Note that the Cas13a | 49C |
| targeting | UAGAACCAAGAUUG | | spacers are truncated by | |
| guide 3 | UUG | | two nucleotides at the 5' | |
| | (SEQ ID No. 433) | | end | |

TABLE 13
Guide sequences used for Cluc knockdown

| | | | | First |
|---|---|---|---|---|
| Name | Spacer sequence | Position | Notes | FIG. |
| Clue tiling | GAGUCCUGGCAAUGA | 32 | Note that the Cas13a | 49D |
| guide 1 | ACAGUGGCGCAGUAG | | spacers are truncated by | |
| | (SEQ ID No. 434) | | two nucleotides at the 5' | |
| | | | end | |
| Clue tiling | GGGUGCCACAGCUGC | 118 | Note that the Cas13a | 49D |
| guide 2 | UAUCAAUACAUUCUC | | spacers are truncated by | |
| | (SEQ ID No. 435) | | two nucleotides at the 5' | |
| | | | end | |
| Clue tiling | GUUACAUACUGACAC | 197 | Note that the Cas13a | 49D |
| guide 3 | AUUCGGCAACAUGUU | | spacers are truncated by | |
| | (SEQ ID No. 436) | | two nucleotides at the 5' | |
| | | | end | |
| Clue tiling | GUAUGUACCAGGUUC | 276 | Note that the Cas13a | 49D |
| guide 4 | CUGGAACUGGAAUCU | | spacers are truncated by | |
| | (SEQ ID No. 437) | | two nucleotides at the 5' | |
| | | | end | |
| Clue tiling | GCCUUGGUUCCAUCC | 350 | Note that the Cas13a | 49D |
| guide 5 | AGGUUCUCCAGGGUG | | spacers are truncated by | |
| | (SEQ ID No. 438) | | two nucleotides at the 5' | |
| | | | end | |
| Clue tiling | GCAGUGAUGGGAUUC | 431 | Note that the Cas13a | 49D |
| guide 6 | UCAGUAGCUUGAGCG | | spacers are truncated by | |
| | (SEQ ID No. 439) | | two nucleotides at the 5' | |
| | | | end | |
| Clue tiling | GAGCCUGGCAUCUCA | 512 | Note that the Cas13a | 49D |
| guide 7 | ACAACAGCGAUGGUG | | spacers are truncated by | |
| | (SEQ ID No. 440) | | two nucleotides at the 5' | |
| | | | end | |
| Clue tiling | GUGUCUGGGGCGAUU | 593 | Note that the Cas13a | 49D |
| guide 8 | CUUACAGAUCUUCCU | | spacers are truncated by | |
| | (SEQ ID No. 441) | | two nucleotides at the 5' | |
| | | | end | |
| Clue tiling | GCUGGAUCUGAAGUG | 671 | Note that the Cas13a | 49D |
| guide 9 | AAGUCUGUAUCUUCC | | spacers are truncated by | |
| | (SEQ ID No. 442) | | two nucleotides at the 5' | |
| | | | end | |
| Clue tiling | GGCAACGUCAUCAGG | 747 | Note that the Cas13a | 49D |
| guide 10 | AUUUCCAUAGAGUGG | | spacers are truncated by | |
| | (SEQ ID No. 443) | | two nucleotides at the 5' | |
| | | | end | |
| Clue tiling | GAGGCGCAGGAGAUG | 830 | Note that the Cas13a | 49D |
| guide 11 | GUGUAGUAGUAGAAG | | spacers are truncated by | |
| | (SEQ ID No. 444) | | two nucleotides at the 5' | |
| | | | end | |
| Clue tiling | GAGGGACCCUGGAAU | 986 | Note that the Cas13a | 49D |
| guide 13 | UGGUAUCUUGCUUUG | | spacers are truncated by | |
| | (SEQ ID No. 445) | | two nucleotides at the 5' | |
| | | | end | |
| Clue tiling | GGUAAGAGUCAACAU | 1066 | Note that the Cas13a | 49D |
| guide 14 | UCCUGUGUGAAACCU | | spacers are truncated by | |
| | (SEQ ID No. 446) | | two nucleotides at the 5' | |
| | | | end | |
| Clue tiling | GACCAGAAUCUGUUU | 1143 | Note that the Cas13a | 49D |
| guide 15 | UCCAUCAACAAUGAG | | spacers are truncated by | |
| | (SEQ ID No. 447) | | two nucleotides at the 5' | |
| | | | end | |
| Clue tiling | GAUGGCUGUAGUCAG | 1227 | Note that the Cas13a | 49D |
| guide 16 | UAUGUCACCAUCUUG | | spacers are truncated by | |
| | (SEQ ID No. 448) | | two nucleotides at the 5' | |
| end | | | | |
| Clue tiling | GUACCAUCGAAUGGA | 1304 | Note that the Cas13a | 49D |
| guide 17 | UCUCUAAUAUGUACG | | spacers are truncated by | |
| | (SEQ ID No. 449) | | two nucleotides at the 5' | |
| | | | end | |
| Clue tiling | GAGAUCACAGGCUCC | 1380 | Note that the Cas13a | 49D |
| guide 18 | UUCAGCAUCAAAAGA | | spacers are truncated by | |
| | (SEQ ID No. 450) | | two nucleotides at the 5' | |
| | | | end | |
| Clue tiling | GCUUUGACCGGCGAA | 1461 | Note that the Cas13a | 49D |
| guide 19 | GAGACUAUUGCAGAG | | spacers are truncated by | |
| | (SEQ ID No. 451) | | two nucleotides at the 5' | |
| | | | end | |
| Clue tiling | GCCCCUCAGGCAAUA | 1539 | Note that the Cas13a | 49D |
| guide 20 | CUCGUACAUGCAUCG | | spacers are truncated by | |
| | (SEQ ID No. 452) | | two nucleotides at the 5' | |
| | | | end | |
| Clue tiling | GCUGGUACUUCUAGG | 1619 | Note that the Cas13a | 49D |
| guide 21 | GUGUCUCCAUGCUUU | | spacers are truncated by | |
| | (SEQ ID No. 453) | | two nucleotides at the 5' | |
| | | | end | |
| Non- | GGUAAUGCCUGGCUU | N/A | Note that the Cas13a | 49D |
| targeting | GUCGACGCAUAGUCU | | spacers are truncated by | |
| guide 1 | G | | two nucleotides at the 5' | |
| | (SEQ ID No. 454) | | end | |
| Non- | GGGAACCUUGGCCGU | N/A | Note that the Cas13a | 49D |
| targeting | UAUAAAGUCUGACCA | | spacers are truncated by | |
| guide 2 | G | | two nucleotides at the 5' | |
| | (SEQ ID No. 455) | | end | |
| Non- | GGAGGGUGAGAAUUU | N/A | Note that the Cas13a | 49D |
| targeting | AGAACCAAGAUUGUU | | spacers are truncated by | |
| guide 3 | G | | two nucleotides at the 5' | |
| | (SEQ ID No. 456) | | end | |

TABLE 14
Guide sequences used in this study for RNA editing in mammalian cells.
Mismatched base flips are capitalized

| | | | First |
|---|---|---|---|
| Name | Spacer sequence | Notes | FIG. |
| Tiling 30 nt 30 | gCauccugcggccucuacucugcauu | Has a 5' G for U6 | 50C |
| mismatch | caauu | expression | |
| distance | (SEQ ID No. 457) | | |
| Tiling 30 nt 28 | gacCauccugcggccucuacucugca | Has a 5' G for U6 | 50C |
| mismatch | uucaa | expression | |
| distance | (SEQ ID No. 458) | | |
| Tiling 30 nt 26 | gaaacCauccugcggccucuacucug | Has a 5' G for U6 | 50C |
| mismatch | cauuc | expression | |
| distance | (SEQ ID No. 459) | | |
| Tiling 30 nt 24 | gcuaaacCauccugcggccucuacuc | Has a 5' G for U6 | 50C |
| mismatch | ugcau | expression | |
| distance | (SEQ ID No. 460) | | |
| Tiling 30 nt 22 | guucuaaacCauccugcggccucuac | Has a 5' G for U6 | 50C |
| mismatch | ucugc | expression | |
| distance | (SEQ ID No. 461) | | |
| Tiling 30 nt 20 | guguucuaaacCauccugcggccucu | Has a 5' G for U6 | 50C |
| mismatch | acucu | expression | |
| distance | (SEQ ID No. 462) | | |
| Tiling 30 nt 18 | gaauguucuaaacCauccugcggccu | Has a 5' G for U6 | 50C |
| mismatch | cuacu | expression | |
| distance | (SEQ ID No. 463) | | |
| Tiling 30 nt 16 | gagaauguucuaaacCauccugcggc | Has a 5' G for U6 | 50C |
| mismatch | cucua | expression | |
| distance | (SEQ ID No. 464) | | |
| Tiling 30 nt 14 | gauagaauguucuaaacCauccugcg | Has a 5' G for U6 | 50C |
| mismatch | gccuc | expression | |
| distance | (SEQ ID No. 465) | | |
| Tiling 30 nt 12 | gccauagaauguucuaaacCauccug | Has a 5' G for U6 | 50C |
| mismatch | cggcc | expression | |
| distance | (SEQ ID No. 466) | | |
| Tiling 30 nt 10 | guuccauagaauguucuaaacCaucc | Has a 5' G for U6 | 50C |
| mismatch | ugcgg | expression | |
| distance | (SEQ ID No. 467) | | |
| Tiling 30 nt 8 | gcuuuccauagaauguucuaaacCau | Has a 5' G for U6 | 50C |
| mismatch | ccugc | expression | |
| distance | (SEQ ID No. 468) | | |
| Tiling 30 nt 6 | gcucuuuccauagaauguucuaaacC | Has a 5' G for U6 | 50C |
| mismatch | auccu | expression | |
| distance | (SEQ ID No. 469) | | |
| Tiling 30 nt 4 | gaucucuuuccauagaauguucuaaa | Has a 5' G for U6 | 50C |
| mismatch | cCauc | expression | |
| distance | (SEQ ID No. 470) | | |
| Tiling 30 nt 2 | ggaaucucuuuccauagaauguucua | Has a 5' G for U6 | 50C |
| mismatch | aacCa | expression | |
| distance | (SEQ ID No. 471) | | |
| Tiling 50 nt 50 | gCauccugcggccucuacucugcauu | Has a 5' G for U6 | 50C |
| mismatch | caauuacauacugacacauucggca | expression | |
| distance | (SEQ ID No. 472) | | |
| Tiling 50 nt 48 | gacCauccugcggccucuacucugca | Has a 5' G for U6 | 50C |
| mismatch | uucaauuacauacugacacauucgg | expression | |
| distance | (SEQ ID No. 473) | | |
| Tiling 50 nt 46 | gaaacCauccugcggccucuacucug | Has a 5' G for U6 | 50C |
| mismatch | cauucaauuacauacugacacauuc | expression | |
| distance | (SEQ ID No. 474) | | |
| Tiling 50 nt 44 | gcuaaacCauccugcggccucuacuc | Has a 5' G for U6 | 50C |
| mismatch | ugcauucaauuacauacugacacau | expression | |
| distance | (SEQ ID No. 475) | | |
| Tiling 50 nt 42 | guucuaaacCauccugcggccucuac | Has a 5' G for U6 | 50C |
| mismatch | ucugcauucaauuacauacugacac | expression | |
| distance | (SEQ ID No. 476) | | |
| Tiling 50 nt 40 | guguucuaaacCauccugcggccucu | Has a 5' G for U6 | 50C |
| mismatch | acucugcauucaauuacauacugac | expression | |
| distance | (SEQ ID No. 477) | | |
| Tiling 50 nt 38 | gaauguucuaaacCauccugcggccu | Has a 5' G for U6 | 50C |
| mismatch | cuacucugcauucaauuacauacug | expression | |
| distance | (SEQ ID No. 478) | | |
| Tiling 50 nt 36 | gagaauguucuaaacCauccugcggc | Has a 5' G for U6 | 50C |
| mismatch | cucuacucugcauucaauuacauac | expression | |
| distance | (SEQ ID No. 479) | | |
| Tiling 50 nt 34 | gauagaauguucuaaacCauccugcg | Has a 5' G for U6 | 50C |
| mismatch | gccucuacucugcauucaauuacau | expression | |
| distance | (SEQ ID No. 480) | | |
| Tiling 50 nt 32 | gccauagaauguucuaaacCauccug | Has a 5' G for U6 | 50C |
| mismatch | cggccucuacucugcauucaauuac | expression | |
| distance | (SEQ ID No. 481) | | |
| Tiling 50 nt 30 | guuccauagaauguucuaaacCaucc | Has a 5' G for U6 | 50C |
| mismatch | ugcggccucuacucugcauucaauu | expression | |
| distance | (SEQ ID No. 482) | | |
| Tiling 50 nt 28 | gcuuuccauagaauguucuaaacCau | Has a 5' G for U6 | 50C |
| mismatch | ccugcggccucuacucugcauucaa | expression | |
| distance | (SEQ ID No. 483) | | |
| Tiling 50 nt 26 | gcucuuuccauagaauguucuaaacC | Has a 5' G for U6 | 50C |
| mismatch | auccugcggccucuacucugcauuc | expression | |
| distance | (SEQ ID No. 484) | | |
| Tiling 50 nt 24 | gaucucuuuccauagaauguucuaaa | Has a 5' G for U6 | 50C |
| mismatch | cCauccugcggccucuacucugcau | expression | |
| distance | (SEQ ID No. 485) | | |
| Tiling 50 nt 22 | ggaaucucuuuccauagaauguucua | Has a 5' G for U6 | 50C |
| mismatch | aacCauccugcggccucuacucugc | expression | |
| distance | (SEQ ID No. 486) | | |
| Tiling 50 nt 20 | guggaaucucuuuccauagaauguuc | Has a 5' G for U6 | 50C |
| mismatch | uaaacCauccugcggccucuacucu | expression | |
| distance | (SEQ ID No. 487) | | |
| Tiling 50 nt 18 | gacuggaaucucuuuccauagaaugu | Has a 5' G for U6 | 50C |
| mismatch | ucuaaacCauccugcggccucuacu | expression | |
| distance | (SEQ ID No. 488) | | |
| Tiling 50 nt 16 | ggaacuggaaucucuuuccauagaau | Has a 5' G for U6 | 50C |
| mismatch | guucuaaacCauccugcggccucua | expression | |
| distance | (SEQ ID No. 489) | | |
| Tiling 50 nt 14 | guggaacuggaaucucuuuccauaga | Has a 5' G for U6 | 50C |
| mismatch | auguucuaaacCauccugcggccu | expression | |
| distance | c(SEQ ID No. 490) | | |
| Tiling 50 nt 12 | gccuggaacuggaaucucuuuccaua | Has a 5' G for U6 | 50C |
| mismatch | gaauguucuaaacCauccugcggcc | expression | |
| distance | (SEQ ID No. 491) | | |
| Tiling 50 nt 10 | guuccuggaacuggaaucucuuucca | Has a 5' G for U6 | 50C |
| mismatch | uagaauguucuaaacCauccugcgg | expression | |
| distance | (SEQ ID No. 492) | | |
| Tiling 50 nt 8 | ggguuccuggaacuggaaucucuuuc | Has a 5' G for U6 | 50C |
| mismatch | cauagaauguucuaaacCauccugc | expression | |
| distance | (SEQ ID No. 493) | | |
| Tiling 50 nt 6 | gcagguuccuggaacuggaaucucuu | Has a 5' G for U6 | 50C |
| mismatch | uccauagaauguucuaaacCauccu | expression | |
| distance | (SEQ ID No. 494) | | |
| Tiling 50 nt 4 | gaccagguuccuggaacuggaaucuc | Has a 5' G for U6 | 50C |
| mismatch | uuuccauagaauguucuaaacCauc | expression | |
| distance | (SEQ ID No. 495) | | |
| Tiling 50 nt 2 | gguaccagguuccuggaacuggaauc | Has a 5' G for U6 | 50C |
| mismatch | ucuuuccauagaauguucuaaacCa | expression | |
| distance | (SEQ ID No. 496) | | |
| Tiling 70 nt 70 | gCauccugcggccucuacucugcauu | Has a 5' G for U6 | 50C |
| mismatch | caauuacauacugacacauucggcaac | expression | |
| distance | auguuuuuccugguuuau | | |
| | (SEQ ID No. 497) | | |
| Tiling 70 nt 68 | gacCauccugcggccucuacucugca | Has a 5' G for U6 | 50C |
| mismatch | uucaauuacauacugacacauucggca | expression | |
| distance | acauguuuuuccugguuu | | |
| | (SEQ ID No. 498) | | |
| Tiling 70 nt 66 | gaaacCauccugcggccucuacucug | Has a 5' G for U6 | 50C |
| mismatch | cauucaauuacauacugacacauucgg | expression | |
| distance | caacauguuuuuccuggu | | |
| | (SEQ ID No. 499) | | |
| Tiling 70 nt 64 | gcuaaacCauccugcggccucuacuc | Has a 5' G for U6 | 50C |
| mismatch | ugcauucaauuacauacugacacauuc | expression | |
| distance | ggcaacauguuuuuccug | | |
| | (SEQ ID No. 500) | | |
| Tiling 70 nt 62 | guucuaaacCauccugcggccucuac | Has a 5' G for U6 | 50C |
| mismatch | ucugcauucaauuacauacugacacau | expression | |
| distance | ucggcaacauguuuuucc | | |
| | (SEQ ID No. 501) | | |
| Tiling 70 nt 60 | guguucuaaacCauccugcggccucu | Has a 5' G for U6 | 50C |
| mismatch | acucugcauucaauuacauacugacac | expression | |
| distance | auucggcaacauguuuuu | | |
| | (SEQ ID No. 502) | | |
| Tiling 70 nt 58 | gaauguucuaaacCauccugcggccu | Has a 5' G for U6 | 50C |
| mismatch | cuacucugcauucaauuacauacugac | expression | |
| distance | acauucggcaacauguuu | | |
| | (SEQ ID No. 503) | | |
| Tiling 70 nt 56 | gagaauguucuaaacCauccugcggc | Has a 5' G for U6 | 50C |
| mismatch | cucuacucugcauucaauuacauacug | expression | |
| distance | acacauucggcaacaugu | | |
| | (SEQ ID No. 504) | | |
| Tiling 70 nt 54 | gauagaauguucuaaacCauccugcg | Has a 5' G for U6 | 50C |
| mismatch | gccucuacucugcauucaauuacauac | expression | |
| distance | ugacacauucggcaacau | | |
| | (SEQ ID No. 505) | | |
| Tiling 70 nt 52 | gccauagaauguucuaaacCauccug | Has a 5' G for U6 | 50C |
| mismatch | cggccucuacucugcauucaauuacau | expression | |
| distance | acugacacauucggcaac | | |
| | (SEQ ID No. 506) | | |
| Tiling 70 nt 50 | guuccauagaauguucuaaacCaucc | Has a 5' G for U6 | 50C |
| mismatch | ugcggccucuacucugcauucaauua | expression | |
| distance | cauacugacacauucggca | | |
| | (SEQ ID No. 507) | | |
| Tiling 70 nt 48 | gcuuuccauagaauguucuaaacCau | Has a 5' G for U6 | 50C |
| mismatch | ccugcggccucuacucugcauucaau | expression | |
| distance | uacauacugacacauucgg | | |
| | (SEQ ID No. 508) | | |
| Tiling 70 nt 46 | gcucuuuccauagaauguucuaaacC | Has a 5' G for U6 | 50C |
| mismatch | auccugcggccucuacucugcauucaa | expression | |
| distance | uuacauacugacacauuc | | |
| | (SEQ ID No. 509) | | |
| Tiling 70 nt 44 | gaucucuuuccauagaauguucuaaa | Has a 5' G for U6 | 50C |
| mismatch | cCauccugcggccucuacucugcauu | expression | |
| distance | caauuacauacugacacau | | |
| | (SEQ ID No. 510) | | |
| Tiling 70 nt 42 | ggaaucucuuuccauagaauguucua | Has a 5' G for U6 | 50C |
| mismatch | aacCauccugcggccucuacucugca | expression | |
| distance | uucaauuacauacugacac | | |
| | (SEQ ID No. 511) | | |
| Tiling 70 nt 40 | guggaaucucuuuccauagaauguuc | Has a 5' G for U6 | 50C |
| mismatch | uaaacCauccugcggccucuacucug | expression | |
| distance | cauucaauuacauacugac | | |
| | (SEQ ID No. 512) | | |
| Tiling 70 nt 38 | gacuggaaucucuuuccauagaaugu | Has a 5' G for U6 | 50C |
| mismatch | ucuaaacCauccugcggccucuacuc | expression | |
| distance | ugcauucaauuacauacug | | |
| | (SEQ ID No. 513) | | |
| Tiling 70 nt 36 | ggaacuggaaucucuuuccauagaau | Has a 5' G for U6 | 50C |
| mismatch | guucuaaacCauccugcggccucuac | expression | |
| distance | ucugcauucaauuacauac | | |
| | (SEQ ID No. 514) | | |
| Tiling 70 nt 34 | guggaacuggaaucucuuuccauaga | Has a 5' G for U6 | 50C |
| mismatch | auguucuaaacCauccugcggccucu | expression | |
| distance | acucugcauucaauuacau | | |
| | (SEQ ID No. 515) | | |
| Tiling 70 nt 32 | gccuggaacuggaaucucuuuccaua | Has a 5' G for U6 | 50C |
| mismatch | gaauguucuaaacCauccugcggccu | expression | |
| distance | cuacucugcauucaauuac | | |
| | (SEQ ID No. 516) | | |
| Tiling 70 nt 30 | guuccuggaacuggaaucucuuucca | Has a 5' G for U6 | 50C |
| mismatch | uagaauguucuaaacCauccugcggc | expression | |
| distance | cucuacucugcauucaauu | | |
| | (SEQ ID No. 517) | | |
| Tiling 70 nt 28 | ggguuccuggaacuggaaucucuuuc | Has a 5' G for U6 | 50C |
| mismatch | cauagaauguucuaaacCauccugcg | expression | |
| distance | gccucuacucugcauucaa | | |
| | (SEQ ID No. 518) | | |
| Tiling 70 nt 26 | gcagguuccuggaacuggaaucucuu | Has a 5' G for U6 | 50C |
| mismatch | uccauagaauguucuaaacCauccug | expression | |
| distance | cggccucuacucugcauuc | | |
| | (SEQ ID No. 519) | | |
| Tiling 70 nt 24 | gaccagguuccuggaacuggaaucuc | Has a 5' G for U6 | 50C |
| mismatch | uuuccauagaauguucuaaacCaucc | expression | |
| distance | ugcggccucuacucugcau | | |
| | (SEQ ID No. 520) | | |
| Tiling 70 nt 22 | gguaccagguuccuggaacuggaauc | Has a 5' G for U6 | 50C |
| mismatch | ucuuuccauagaauguucuaaacCau | expression | |
| distance | ccugcggccucuacucugc | | |
| | (SEQ ID No. 521) | | |
| Tiling 70 nt 20 | gauguaccagguuccuggaacuggaa | Has a 5' G for U6 | 50C |
| mismatch | ucucuuuccauagaauguucuaaacC | expression | |
| distance | auccugcggccucuacucu | | |
| | (SEQ ID No. 522) | | |
| Tiling 70 nt 18 | gguauguaccagguuccuggaacugg | Has a 5' G for U6 | 50C |
| mismatch | aaucucuuuccauagaauguucuaaac | expression | |
| distance | Cauccugcggccucuacu | | |
| | (SEQ ID No. 523) | | |
| Tiling 70 nt 16 | gacguauguaccagguuccuggaacu | Has a 5' G for U6 | 50C |
| mismatch | ggaaucucuuuccauagaauguucua | expression | |
| distance | aacCauccugcggccucua | | |
| | (SEQ ID No. 524) | | |
| Tiling 70 nt 14 | gacacguauguaccagguuccuggaa | Has a 5' G for U6 | 50C |
| mismatch | cuggaaucucuuuccauagaauguuc | expression | |
| distance | uaaacCauccugcggccuc | | |
| | (SEQ ID No. 525) | | |
| Tiling 70 nt 12 | gcaacacguauguaccagguuccugg | Has a 5' G for U6 | 50C |
| mismatch | aacuggaaucucuuuccauagaaugu | expression | |
| distance | ucuaaacCauccugcggcc | | |
| | (SEQ ID No. 526) | | |
| Tiling 70 nt 10 | gcccaacacguauguaccagguuccug | Has a 5' G for U6 | 50C |
| mismatch | gaacuggaaucucuuuccauagaaug | expression | |
| distance | uucuaaacCauccugcgg | | |
| | (SEQ ID No. 527) | | |
| Tiling 70 nt 8 | ggacccaacacguauguaccagguucc | Has a 5' G for U6 | 50C |
| mismatch | uggaacuggaaucucuuuccauagaa | expression | |
| distance | uguucuaaacCauccugc | | |
| | (SEQ ID No. 528) | | |
| Tiling 70 nt 6 | guugacccaacacguauguaccaggu | Has a 5' G for U6 | 50C |
| mismatch | uccuggaacuggaaucucuuuccaua | expression | |
| distance | gaauguucuaaacCauccu | | |
| | (SEQ ID No. 529) | | |
| Tiling 70 nt 4 | gccuugacccaacacguauguaccagg | Has a 5' G for U6 | 50C |
| mismatch | uuccuggaacuggaaucucuuuccau | expression | |
| distance | agaauguucuaaacCauc | | |
| | (SEQ ID No. 530) | | |
| Tiling 70 nt 2 | guuccuugacccaacacguauguacca | Has a 5' G for U6 | 50C |
| mismatch | gguuccuggaacuggaaucucuuucc | expression | |
| distance | auagaauguucuaaacCa (SEQ | ID | |
| No. 531) | | | |
| Tiling 84 nt 84 | gCauccugcggccucuacucugcauu | Has a 5' G for U6 | 50C |
| mismatch | caauuacauacugacacauucggcaac | expression | |
| distance | auguuuuuccugguuuauuuucacac | | |
| | agucca (SEQ ID No. 532) | | |
| Tiling 84 nt 82 | gacCauccugcggccucuacucugca | Has a 5' G for U6 | 50C |
| mismatch | uucaauuacauacugacacauucggca | expression | |
| distance | acauguuuuuccugguuuauuuucac | | |
| | acaguc (SEQ ID No. 533) | | |
| Tiling 84 nt 80 | gaaacCauccugcggccucuacucug | Has a 5' G for U6 | 50C |
| mismatch | cauucaauuacauacugacacauucgg | expression | |
| distance | caacauguuuuuccugguuuauuuuc | | |
| | acacag (SEQ ID No. 534) | | |
| Tiling 84 nt 78 | gcuaaacCauccugcggccucuacuc | Has a 5' G for U6 | 50C |
| mismatch | ugcauucaauuacauacugacacauuc | expression | |
| distance | ggcaacauguuuuuccugguuuauuu | | |
| | ucacac (SEQ ID No. 535) | | |
| Tiling 84 nt 76 | guucuaaacCauccugcggccucuac | Has a 5' G for U6 | 50C |
| mismatch | ucugcauucaauuacauacugacacau | expression | |
| distance | ucggcaacauguuuuuccugguuuau | | |
| | uuucac (SEQ ID No. 536) | | |
| Tiling 84 nt 74 | guguucuaaacCauccugcggccucu | Has a 5' G for U6 | 50C |
| mismatch | acucugcauucaauuacauacugacac | expression | |
| distance | auucggcaacauguuuuuccugguuu | | |
| | auuuuc (SEQ ID No. 537) | | |
| Tiling 84 nt 72 | gaauguucuaaacCauccugcggccu | Has a 5' G for U6 | 50C |
| mismatch | cuacucugcauucaauuacauacugac | expression | |
| distance | acauucggcaacauguuuuuccuggu | | |
| | uuauuu (SEQ ID No. 538) | | |
| Tiling 84 nt 70 | gagaauguucuaaacCauccugcggc | Has a 5' G for U6 | 50C |
| mismatch | cucuacucugcauucaauuacauacug | expression | |
| distance | acacauucggcaacauguuuuuccug | | |
| | guuuau (SEQ ID No. 539) | | |
| Tiling 84 nt 68 | gauagaauguucuaaacCauccugcg | Has a 5' G for U6 | 50C |
| mismatch | gccucuacucugcauucaauuacauac | expression | |
| distance | ugacacauucggcaacauguuuuucc | | |
| | ugguuu (SEQ ID No. 540) | | |
| Tiling 84 nt 66 | gccauagaauguucuaaacCauccug | Has a 5' G for U6 | 50C |
| mismatch | cggccucuacucugcauucaauuacau | expression | |
| distance | acugacacauucggcaacauguuuuu | | |
| | ccuggu (SEQ ID No. 541) | | |
| Tiling 84 nt 64 | guuccauagaauguucuaaacCaucc | Has a 5' G for U6 | 50C |
| mismatch | ugcggccucuacucugcauucaauua | expression | |
| distance | cauacugacacauucggcaacauguuu | | |
| | uuccug (SEQ ID No. 542) | | |
| Tiling 84 nt 62 | gcuuuccauagaauguucuaaacCau | Has a 5' G for U6 | 50C |
| mismatch | ccugcggccucuacucugcauucaau | expression | |
| distance | uacauacugacacauucggcaacaugu | | |
| | uuuucc (SEQ ID No. 543) | | |
| Tiling 84 nt 60 | gcucuuuccauagaauguucuaaacC | Has a 5' G for U6 | 50C |
| mismatch | auccugcggccucuacucugcauucaa | expression | |
| distance | uuacauacugacacauucggcaacaug | | |
| | uuuuu (SEQ ID No. 544) | | |
| Tiling 84 nt 58 | gaucucuuuccauagaauguucuaaa | Has a 5' G for U6 | 50C |
| mismatch | cCauccugcggccucuacucugcauu | expression | |
| distance | caauuacauacugacacauucggcaac | | |
| | auguuu (SEQ ID No. 545) | | |
| Tiling 84 nt 56 | ggaaucucuuuccauagaauguucua | Has a 5' G for U6 | 50C |
| mismatch | aacCauccugcggccucuacucugca | expression | |
| distance | uucaauuacauacugacacauucggca | | |
| | acaugu (SEQ ID No. 546) | | |
| Tiling 84 nt 54 | guggaaucucuuuccauagaauguuc | Has a 5' G for U6 | 50C |
| mismatch | uaaacCauccugcggccucuacucug | expression | |
| distance | cauucaauuacauacugacacauucgg | | |
| | caacau (SEQ ID No. 547) | | |
| Tiling 84 nt 52 | gacuggaaucucuuuccauagaaugu | Has a 5' G for U6 | 50C |
| mismatch | ucuaaacCauccugcggccucuacuc | expression | |
| distance | ugcauucaauuacauacugacacauuc | | |
| | ggcaac (SEQ ID No. 548) | | |
| Tiling 84 nt 50 | ggaacuggaaucucuuuccauagaau | Has a 5' G for U6 | 50C |
| mismatch | guucuaaacCauccugcggccucuac | expression | |
| distance | ucugcauucaauuacauacugacacau | | |
| | ucggca (SEQ ID No. 549) | | |
| Tiling 84 nt 48 | guggaacuggaaucucuuuccauaga | Has a 5' G for U6 | 50C |
| mismatch | auguucuaaacCauccugcggccucu | expression | |
| distance | acucugcauucaauuacauacugacac | | |
| | auucgg (SEQ ID No. 550) | | |
| Tiling 84 nt 46 | gccuggaacuggaaucucuuuccaua | Has a 5' G for U6 | 50C |
| mismatch | gaauguucuaaacCauccugcggccu | expression | |
| distance | cuacucugcauucaauuacauacugac | | |
| | acauuc (SEQ ID No. 551) | | |
| Tiling 84 nt 44 | guuccuggaacuggaaucucuuucca | Has a 5' G for U6 | 50C |
| mismatch | uagaauguucuaaacCauccugcggc | expression | |
| distance | cucuacucugcauucaauuacauacug | | |
| | acacau (SEQ ID No. 552) | | |
| Tiling 84 nt 42 | ggguuccuggaacuggaaucucuuuc | Has a 5' G for U6 | 50C |
| mismatch | cauagaauguucuaaacCauccugcg | expression | |
| distance | gccucuacucugcauucaauuacauac | | |
| | ugacac (SEQ ID No. 553) | | |
| Tiling 84 nt 40 | gcagguuccuggaacuggaaucucuu | Has a 5' G for U6 | 50C |
| mismatch | uccauagaauguucuaaacCauccug | expression | |
| distance | cggccucuacucugcauucaauuacau | | |
| | acugac (SEQ ID No. 554) | | |
| Tiling 84 nt 38 | gaccagguuccuggaacuggaaucuc | Has a 5' G for U6 | 50C |
| mismatch | uuuccauagaauguucuaaacCaucc | expression | |
| distance | ugcggccucuacucugcauucaauua | | |
| | cauacug (SEQ ID No. 555) | | |
| Tiling 84 nt 36 | gguaccagguuccuggaacuggaauc | Has a 5' G for U6 | 50C |
| mismatch | ucuuuccauagaauguucuaaacCau | expression | |
| distance | ccugcggccucuacucugcauucaau | | |
| | uacauac (SEQ ID No. 556) | | |
| Tiling 84 nt 34 | gauguaccagguuccuggaacuggaa | Has a 5' G for U6 | 50C |
| mismatch | ucucuuuccauagaauguucuaaacC | expression | |
| distance | auccugcggccucuacucugcauucaa | | |
| | uuacau (SEQ ID No. 557) | | |
| Tiling 84 nt 32 | gguauguaccagguuccuggaacugg | Has a 5' G for U6 | 50C |
| mismatch | aaucucuuuccauagaauguucuaaac | expression | |
| distance | Cauccugcggccucuacucugcauuc | | |
| | aauuac (SEQ ID No. 558) | | |
| Tiling 84 nt 30 | gacguauguaccagguuccuggaacu | Has a 5' G for U6 | 50C |
| mismatch | ggaaucucuuuccauagaauguucua | expression | |
| distance | aacCauccugcggccucuacucugca | | |
| | uucaauu (SEQ ID No. 559) | | |
| Tiling 84 nt 28 | gacacguauguaccagguuccuggaa | Has a 5' G for U6 | 50C |
| mismatch | cuggaaucucuuuccauagaauguuc | expression | |
| distance | uaaacCauccugcggccucuacucug | | |
| | cauucaa (SEQ ID No. 560) | | |
| Tiling 84 nt 26 | gcaacacguauguaccagguuccugg | Has a 5' G for U6 | 50C |
| mismatch | aacuggaaucucuuuccauagaaugu | expression | |
| distance | ucuaaacCauccugcggccucuacuc | | |
| | ugcauuc (SEQ ID No. 561) | | |
| Tiling 84 nt 24 | gcccaacacguauguaccagguuccug | Has a 5' G for U6 | 50C |
| mismatch | gaacuggaaucucuuuccauagaaug | expression | |
| distance | uucuaaacCauccugcggccucuacu | | |
| | cugcau (SEQ ID No. 562) | | |
| Tiling 84 nt 22 | ggacccaacacguauguaccagguucc | Has a 5' G for U6 | 50C |
| mismatch | uggaacuggaaucucuuuccauagaa | expression | |
| distance | uguucuaaacCauccugcggccucua | | |
| | cucugc (SEQ ID No. 563) | | |
| Tiling 84 nt 20 | guugacccaacacguauguaccaggu | Has a 5' G for U6 | 50C |
| mismatch | uccuggaacuggaaucucuuuccaua | expression | |
| distance | gaauguucuaaacCauccugcggccu | | |
| | cuacucu (SEQ ID No. 564) | | |
| Tiling 84 nt 18 | gccuugacccaacacguauguaccagg | Has a 5' G for U6 | 50C |
| mismatch | uuccuggaacuggaaucucuuuccau | expression | |
| distance | agaauguucuaaacCauccugcggcc | | |
| | ucuacu (SEQ ID No. 565) | | |
| Tiling 84 nt 16 | guuccuugacccaacacguauguacca | Has a 5' G for U6 | 50C |
| mismatch | gguuccuggaacuggaaucucuuucc | expression | |
| distance | auagaauguucuaaacCauccugcgg | | |
| | ccucua (SEQ ID No. 566) | | |
| Tiling 84 nt 14 | ggguuccuugacccaacacguaugua | Has a 5' G for U6 | 50C |
| mismatch | ccagguuccuggaacuggaaucucuu | expression | |
| distance | uccauagaauguucuaaacCauccug | | |
| | cggccuc (SEQ ID No. 567) | | |
| Tiling 84 nt 12 | guugguuccuugacccaacacguaug | Has a 5' G for U6 | 50C |
| mismatch | uaccagguuccuggaacuggaaucuc | expression | |
| distance | uuuccauagaauguucuaaacCaucc | | |
| | ugcggcc (SEQ ID No. 568) | | |
| Tiling 84 nt 10 | gccuugguuccuugacccaacacgua | Has a 5' G for U6 | 50C |
| mismatch | uguaccagguuccuggaacuggaauc | expression | |
| distance | ucuuuccauagaauguucuaaacCau | | |
| | ccugcgg (SEQ ID No. 569) | | |
| Tiling 84 nt 8 | ggcccuugguuccuugacccaacacg | Has a 5' G for U6 | 50C |
| mismatch | uauguaccagguuccuggaacuggaa | expression | |
| distance | ucucuuuccauagaauguucuaaacC | | |
| | auccugc (SEQ ID No. 570) | | |
| Tiling 84 nt 6 | gccgcccuugguuccuugacccaacac | Has a 5' G for U6 | 50C |
| mismatch | guauguaccagguuccuggaacugga | expression | |
| distance | aucucuuuccauagaauguucuaaac | | |
| | cauccu (SEQ ID No. 571) | | |
| Tiling 84 nt 4 | gcgccgcccuugguuccuugacccaac | Has a 5' G for U6 | 50C |
| mismatch | acguauguaccagguuccuggaacug | expression | |
| distance | gaaucucuuuccauagaauguucuaa | | |
| | accauc (SEQ ID No. 572) | | |
| Tiling 84 nt 2 | ggucgccgcccuugguuccuugaccc | Has a 5' G for U6 | 50C |
| mismatch | aacacguauguaccagguuccuggaac | expression | |
| distance | uggaaucucuuuccauagaauguucu | | |
| | aaacca(SEQ ID No. 573) | | |
| ADAR non- | GUAAUGCCUGGCUUGUC | Has a 5' G for U6 | 50C |
| targeting guide | GACGCAUAGUCUG | expression | |
| | (SEQ ID No. 574) | | |
| PFS binding | gaaaacgcagguuccucCaguuucgg | Has a 5' G for U6 | 51B |
| screen guide for | gagcagcgcacgucucccuguaguc | expression | |
| TAG motif | (SEQ ID No. 575) | | |
| PFS binding | gacgcagguuccucuagCuucgggag | Has a 5' G for U6 | 51B |
| screen guide for | cagcgcacgucucccuguagucaag | expression | |
| AAC motif | (SEQ ID No. 576) | | |
| PFS binding | GUAAUGCCUGGCUUGUC | Has a 5' G for U6 | 51B |
| screen non- | GACGCAUAGUCUG | expression | |
| targeting | (SEQ ID No. 577) | | |
| Motif preference | gauagaauguucuaaacCauccugcg | Has a 5' G for U6 | 51C |
| targeting guide | gccucuacucugcauucaauuacau | expression | |
| | (SEQ ID No. 578) | | |
| Motif preference | GUAAUGCCUGGCUUGUC | Has a 5' G for U6 | 51C |
| non-targeting | GACGCAUAGUCUG | expression | |
| guide | (SEQ ID No. 579) | | |
| PPIB tiling guide | gCaaggccacaaaauuauccacuguu | Has a 5' G for U6 | 57D |
| 50 mismatch | uuuggaacagucuuuccgaagagac | expression | |
| distance | (SEQ ID No. 580) | | |
| PPIB tiling guide | gccuguagcCaaggccacaaaauuau | Has a 5' G for U6 | 57D |
| 42 mismatch | ccacuguuuuuggaacagucuuucc | expression | |
| distance | (SEQ ID No. 581) | | |
| PPIB tiling guide | gcuuucucuccuguagcCaaggccac | Has a 5' G for U6 | 57D |
| 34 mismatch | aaaauuauccacuguuuuuggaaca | expression | |
| distance | (SEQ ID No. 582) | | |
| PPIB tiling guide | ggccaaauccuuucucuccuguagcc | Has a 5' G for U6 | 57D |
| 26 mismatch | aaggccacaaaauuauccacuguuu | expression | |
| distance | (SEQ ID No. 583) | | |
| PPIB tiling guide | guuuuuguagccaaauccuuucucuc | Has a 5' G for U6 | 57D |
| 18 mismatch | cuguagcCaaggccacaaaauuauc | expression | |
| distance | (SEQ ID No. 584) | | |
| PPIB tiling guide | gauuugcuguuuuuguagccaaaucc | Has a 5' G for U6 | 57D |
| 10 mismatch | uuucucuccuguagcCaaggccaca | expression | |
| distance | (SEQ ID No. 585) | | |
| PPIB tiling guide | gacgauggaauuugcuguuuuuguag | Has a 5' G for U6 | 57D |
| 2 mismatch | ccaaauccuuucucuccuguagcCa | expression | |
| distance | (SEQ ID No. 586) | | |
| Targeting guide, | gauagaauguucuaaacGauccugcg | Has a 5' G for U6 | 57D |
| opposite base G | gccucuacucugcauucaauuacau | expression | |
| | (SEQ ID No. 587) | | |
| Targeting guide, | gauagaauguucuaaacAauccugcg | Has a 5' G for U6 | 57D |
| opposite base A | gccucuacucugcauucaauuacau | expression | |
| | (SEQ ID No. 588) | | |
| Targeting guide, | gauagaauguucuaaacUauccugcg | Has a 5' G for U6 | 57D |
| opposite base C | gccucuacucugcauucaauuacau | expression | |
| | (SEQ ID No. 589) | | |
| AVPR2 guide 37 | ggucccacgcggccCacagcugcacc | Has a 5' G for U6 | 52A |
| mismatch | aggaagaagggugcccagcacagca | expression | |
| distance | (SEQ ID No. 590) | | |
| AVPR2 guide 35 | ggggucccacgcggccCacagcugca | Has a 5' G for U6 | 52A |
| mismatch | ccaggaagaagggugcccagcacag | expression | |
| distance | (SEQ ID No. 591) | | |
| AVPR2 guide 33 | gccgggucccacgcggccCacagcug | Has a 5' G for U6 | 52A |
| mismatch | caccaggaagaagggugcccagcac | expression | |
| distance | (SEQ ID No. 592) | | |
| FANCC guide 37 | gggugaugacauccCaggcgaucgug | Has a 5' G for U6 | 52B |
| mismatch | uggccuccaggagcccagagcagga | expression | |
| distance | (SEQ ID No. 593) | | |
| FANCC guide 35 | gagggugaugacauccCaggcgaucg | Has a 5' G for U6 | 52B |
| mismatch | uguggccuccaggagcccagagcag | expression | |
| distance | (SEQ ID No. 594) | | |
| FANCC guide 32 | gaucagggugaugacauccCaggcga | Has a 5' G for U6 | 52B |
| mismatch | ucguguggccuccaggagcccagag | expression | |
| distance | (SEQ ID No. 595) | | |
| Synthetic disease | gguggcuccauucacucCaaugcuga | Has a 5' G for U6 | 52E |
| gene target | gcacuuccacagaguggguuaaagc | expression | |
| IL2RG | (SEQ ID No. 596) | | |
| Synthetic disease | guuucuaauauauuuugCcagacuga | Has a 5' G for U6 | 52E |
| gene target F8 | uggacuauucucaauuaauaaugau | expression | |
| | (SEQ ID No. 597) | | |
| Synthetic disease | gagauguugcuguggauCcaguccac | Has a 5' G for U6 | 52E |
| gene target LDLR | agccagcccgucgggggccuggaug | expression | |
| | (SEQ ID No. 598) | | |
| Synthetic disease | gcaggccggcccagcugCcaggugca | Has a 5' G for U6 | 52E |
| gene target CBS | ccugcucggagcaucgggccggauc | expression | |
| | (SEQ ID No. 599) | | |
| Synthetic disease | gcaaagaaccucuggguCcaagggua | Has a 5' G for U6 | 52E |
| gene target HBB | gaccaccagcagccugcccagggcc | expression | |
| | (SEQ ID No. 600) | | |
| Synthetic disease | gaagagaaacuuaguuuCcagggcuu | Has a 5' G for U6 | 52E |
| gene target | ugguagagggcaaagguugauagca | expression | |
| ALDOB | (SEQ ID No. 601) | | |
| Synthetic disease | gucagccuagugcagagCcacuggua | Has a 5' G for U6 | 52E |
| gene target DMD | guuggugguuagaguuucaaguucc | expression | |
| (SEQ ID No. 602) | | | |
| Synthetic disease | ggcucauugugaacaggCcaguaaug | Has a 5' G for U6 | 52E |
| gene target | uccgggauggggcggcauaggcggg | expression | |
| SMAD4 | (SEQ ID No. 603) | | |
| Synthetic disease | guagcuaaagaacuugaCcaagacau | Has a 5' G for U6 | 52E |
| gene target | aucaggauccaccucagcuccuaga | expression | |
| BRCA2 | (SEQ ID No. 604) | | |
| Synthetic disease | ggggcauuguucugugcCcaguccu | Has a 5' G for U6 | 52E |
| gene target | gcugguagaccugcuccccgguggcu | expression | |
| GRIN2A | (SEQ ID No. 605) | | |
| Synthetic disease | gagaagucguucaugugCcaccgugg | Has a 5' G for U6 | 52E |
| gene target | gagcguacagucaucauugaucuug | expression | |
| SCN9A | (SEQ ID No. 606) | | |
| Synthetic disease | gggauuaaugcugaacgcaccaaagu | Has a 5' G for U6 | 52E |
| gene target | ucaucccaccacccauauuacuacc | expression | |
| TARDBP | (SEQ ID No. 607) | | |
| Synthetic disease | gcuccaaaggcuuuccuCcacuguug | Has a 5' G for U6 | 52E |
| gene target CFTR | caaaguuauugaaucccaagacaca | expression | |
| | (SEQ ID No. 608) | | |
| Synthetic disease | gaugaaugaacgauuucCcagaacuc | Has a 5' G for U6 | 52E |
| gene target | ccuaaucagaacagagucccuggua | expression | |
| UBE3A | (SEQ ID No. 609) | | |
| Synthetic disease | ggagccucugccggagcCcagagaac | Has a 5' G for U6 | 52E |
| gene target | ccgagagucagacagagccagcgcc | expression | |
| SMPD1 | (SEQ ID No. 610) | | |
| Synthetic disease | ggcuuccguggagacacCcaaucaau | Has a 5' G for U6 | 52E |
| gene target | uugaagagaucuugaagugaugcca | expression | |
| USH2A | (SEQ ID No. 611) | | |
| Synthetic disease | gugggacugcccuccucCcauuugca | Has a 5' G for U6 | 52E |
| gene target | gaugccgucguagaaucgcagcagg | expression | |
| MEN1 | (SEQ ID No. 612) | | |
| Synthetic disease | gcuucuucaauaguucuCcagcuaca | Has a 5' G for U6 | 52E |
| gene target | cuggcaggcauaugcccguguuccu | expression | |
| C8orf37 | (SEQ ID No. 613) | | |
| Synthetic disease | gauuccuuuucuucgucCcaauucac | Has a 5' G for U6 | 52E |
| gene target | cucaguggcuagucgaagaaugaag | expression | |
| MLH1 | (SEQ ID No. 614) | | |
| Synthetic disease | gcagcuucagcaccuucCagucagac | Has a 5' G for U6 | 52E |
| gene target TSC2 | uccugcuucaagcacugcagcagga | expression | |
| | (SEQ ID No. 615) | | |
| Synthetic disease | gccauuugcuugcagugCcacuccag | Has a 5' G for U6 | 52E |
| gene target NF1 | aggauuccggauugccauaaauacu | expression | |
| | (SEQ ID No. 616) | | |
| Synthetic disease | guucaauaguuuuggucCaguaucg | Has a 5' G for U6 | 52E |
| gene target MSH6 | uuuacagcccuucuugguagauuuca | expression | |
| | (SEQ ID No. 617) | | |
| Synthetic disease | ggcaaccgucuucugacCaaauggca | Has a 5' G for U6 | 52E |
| gene target SMN1 | gaacauuuguccccaacuuuccacu | expression | |
| | (SEQ ID No. 618) | | |
| Synthetic disease | gcgacuuuccaaugaacCacugaagc | Has a 5' G for U6 | 52E |
| gene target | ccagguaugacaaagccgaugaucu | expression | |
| SH3TC2 | (SEQ ID No. 619) | | |
| Synthetic disease | guuuacacucaugcuucCacagcuuu | Has a 5' G for U6 | 52E |
| gene target | aacagaucauuugguuccuugauga | expression | |
| DNAH5 | (SEQ ID No. 620) | | |
| Synthetic disease | gcuuaagcuuccgugucCagccuuca | Has a 5' G for U6 | 52E |
| gene target | ggcaggguggggucaucauacaugg | expression | |
| MECP2 | (SEQ ID No. 621) | | |
| Synthetic disease | ggacagcugggcugaucCaugauguc | Has a 5' G for U6 | 52E |
| gene target | auccagaaacacuggggacccucag | expression | |
| ADGRV1 | (SEQ ID No. 622) | | |
| Synthetic disease | gucucaucucaacuuucCauauccgu | Has a 5' G for U6 | 52E |
| gene target AHI1 | aucauggaaucauagcauccuguaa | expression | |
| | (SEQ ID No. 623) | | |
| Synthetic disease | gcaugcagacgcgguucCacucgcag | Has a 5' G for U6 | 52E |
| gene target PRKN | ccacaguuccagcaccacucgagcc | expression | |
| | (SEQ ID No. 624) | | |
| Synthetic disease | guugguuagggucaaccCaguauucu | Has a 5' G for U6 | 52E |
| gene target | ccacucuugaguucaggauggcaga | expression | |
| COL3A1 | (SEQ ID No. 625) | | |
| Synthetic disease | gcuacacuguccaacacCcacucucg | Has a 5' G for U6 | 52E |
| gene target | ggucaccacaggugccucacacauc | expression | |
| BRCA1 | (SEQ ID No. 626) | | |
| Synthetic disease | gcugcacuguguaccccCagagcucc | Has a 5' G for U6 | 52E |
| gene target | guguugccgacauccugggguggcu | expression | |
| MYBPC3 | (SEQ ID No. 627) | | |
| Synthetic disease | gagcuuccugccacuccCaacagguu | Has a 5' G for U6 | 52E |
| gene target APC | ucacaguaagcgcguaucuguucca | expression | |
| | (SEQ ID No. 628) | | |
| Synthetic disease | gacggcaagagcuuaccCagucacuu | Has a 5' G for U6 | 52E |
| gene target | guguggagacuuaaauacuugcaua | expression | |
| BMPR2 | (SEQ ID No. 629) | | |
| KRAS tiling | gCaaggccacaaaauuauccacuguu | Has a 5' G for U6 | 53A |
| guide 50 | uuuggaacagucuuuccgaagagac | expression | |
| mismatch | (SEQ ID No. 630) | | |
| distance | | | |
| KRAS tiling | gccuguagcCaaggccacaaaauuau | Has a 5' G for U6 | 53A |
| guide 42 | ccacuguuuuuggaacagucuuucc | expression | |
| mismatch | (SEQ ID No. 631) | | |
| distance | | | |
| KRAS tiling | gcuuucucuccuguagcCaaggccac | Has a 5' G for U6 | 53A |
| guide 34 | aaaauuauccacuguuuuuggaaca | expression | |
| mismatch | (SEQ ID No. 632) | | |
| distance | | | |
| KRAS tiling | ggccaaauccuuucucuccuguagcC | Has a 5' G for U6 | 53A |
| guide 26 | aaggccacaaaauuauccacuguuu | expression | |
| mismatch | (SEQ ID No. 633) | | |
| distance | | | |
| KRAS tiling | guuuuuguagccaaauccuuucucuc | Has a 5' G for U6 | 53A |
| guide 18 | cuguagcCaaggccacaaaauuauc | expression | |
| mismatch | (SEQ ID No. 634) | | |
| distance | | | |
| KRAS tiling | gauuugcuguuuuuguagccaaaucc | Has a 5' G for U6 | 53A |
| guide 10 | uuucucuccuguagcCaaggccaca | expression | |
| mismatch | (SEQ ID No. 635) | | |
| distance | | | |
| KRAS tiling | gacgauggaauuugcuguuuuuguag | Has a 5' G for U6 | 53A |
| guide 2 mismatch | ccaaauccuuucucuccuguagcCa | expression | |
| distance | (SEQ ID No. 636) | | |
| KRAS tiling non- | GUAAUGCCUGGCUUGUC | Has a 5' G for U6 | 53A |
| targeting guide | GACGCAUAGUCUG | expression | |
| | (SEQ ID No. 637) | | |
| Luciferase W85X | gauagaauguucuaaacCauccugcg | Has a 5' G for U6 | 53B |
| targeting guide | gccucuacucugcauucaauuacau | expression | |
| for transcriptome | (SEQ ID No. 638) | | |
| specificity | | | |
| Non-targeting | GCAGGGUUUUCCCAGUC | Has a 5' G for U6 | 53C |
| guide for | ACGACGUUGUAAAGUUG | expression | |
| transcriptome | (SEQ ID No. 639) | | |
| specificity | | | |
| endogenous | gucaaggcacucuugccCacgccacc | Has a 5' G for U6 | 54F |
| KRAS guide 2 | agcuccaacuaccacaaguuuauau | expression | |
| | (SEQ ID No. 640) | | |
| endogenous PPIB | gcaaagaucacccggccCacaucuuca | Has a 5' G for U6 | 54G |
| guide 1 | ucuccaauucguaggucaaaauac | expression | |
| | (SEQ ID No. 641) | | |
| endogenous | GcgccaccagcuccaacCaccacaag | Has a 5' G for U6 | 54F |
| KRAS guide 1 | uuuauauucagucauuuucagcagg | expression | |
| | (SEQ ID No. 642) | | |
| endogenous | GuuucuccaucaauuacCacuugcu | Has a 5' G for U6 | 54F |
| KRAS guide 3 | uccuguaggaauccucuauuGUugg | expression | |
| a | (SEQ ID No. 643) | | |
| endogenous PPIB | GcuuucucuccuguagcCaaggccac | Has a 5' G for U6 | 54G |
| guide 2 | aaaauuauccacuguuuuuggaaca | expression | |
| | (SEQ ID No. 644) | | |
| endogenous non- | GUAAUGCCUGGCUUGUC | Has a 5' G for U6 | 54F |
| targeting guide | GACGCAUAGUCUG | expression | |
| | (SEQ ID No. 645) | | |
| BoxB Cluc guide | ucuuuccauaGGCCCUGAAAA | Has a 5' G for U6 | 62B |
| | AGGGCCuguucuaaacCauccug | expression | |
| | cggccucuacucGGCCCUGAAA | | |
| | AAGGGCCauucaauuac | | |
| | (SEQ ID No. 646) | | |
| BoxB non- | cagcuggcgaGGCCCUGAAAA | Has a 5' G for U6 | 62B |
| targeting guide | AGGGCCggggaugugcCgcaagg | expression | |
| | cgauuaaguuggGGCCCUGAA | | |
| | AAAGGGCCacgccagggu | | |
| | (SEQ ID No. 647) | | |
| Stafforst full | GUGGAAUAGUAUAACAA | Has a 5' G for U6 | 62C |
| length ADAR2 | UAUGCUAAAUGUUGUUA | expression | |
| guide 1 | UAGUAUCCCACucuaaaCCA | | |
| | uccugcgGGGCCCUCUUCAG | | |
| | GGCCC | | |
| | (SEQ ID No. 648) | | |
| Stafforst full | GUGGAAUAGUAUAACAA | Has a 5' G for U6 | 62C |
| length ADAR2 | UAUGCUAAAUGUUGUUA | expression | |
| non-targeting | UAGUAUCCCACacccuggcgu | | |
| guide | uacccaGGGCCCUCUUCAGG | | |
| | GCCC | | |
| | (SEQ ID No. 649) | | |

### Example 4—REPAIRv3 Search

[1471] To identifying additional ADAR mutants with increased efficiency and specificity, Cas13b-ADAR fusions with various mutations in the ADAR deaminase domain were assayed on the luciferase target.

[1472] As shown in FIG. 77, R455H and S458F mutants each exhibited increased efficiency and specificity compared to REPAIRv1 (dCas13b-ADAR2_{DD}(E488Q)).

[1473] As shown in FIG. 79, H460P mutant exhibited increased efficiency compared to REPAIRv2 (dCas13b-ADAR2_{DD}(E488Q/T375G)) and increased specificity compared to REPAIRv1.H460I and A476E mutants each exhibited increased efficiency and specificity compared to REPAIRv1, and increased efficiency compared to REPAIRv2.

[1474] As shown in FIG. 81, V351Y, V351M and V351T mutants each exhibited increased specificity compared to REPAIRv1 at similar efficiency, and increased efficiency compared to REPAIRv2 at similar specificity.

[1475] As shown in FIG. 82, T375H, T375C and T375Q mutants each exhibited increased specificity compared to REPAIRv1 at similar efficiency, and increased efficiency compared to REPAIRv2 at similar specificity.

[1476] As shown in FIG. 83, R455H mutant exhibited increased specificity compared to REPAIRv1 at similar efficiency, and increased efficiency compared to REPAIRv2 at similar specificity.

[1477] As shown in FIG. 84, V351Y, V351M, V351T, T375H, T375C, T375Q, G478R, S485F, and H460I mutants each exhibited increased specificity compared to REPAIRv1, and increased efficiency compared to REPAIRv2. pMAX was used as a GFP control.

[1478] As shown in FIG. 86, V351Y, V351M, T375H, T375Q, and H460P mutants each exhibited increased specificity compared to REPAIRv1, and increased efficiency compared to REPAIRv2.

[1479] As shown in FIGS. 89-90, a number of combination mutants exhibited increased specificity compared to REPAIRv1, and increased efficiency compared to REPAIRv2. Among them, T375S/S458F combination mutant exhibited both increased efficiency and increased specificity compared to REPAIRv1, as well as increased efficiency compared to REPAIRv2.

### Example 5—ADAR Mutants Having C-to-U Deamination Activity

[1480] To identifying ADAR mutants having C-to-U deamination activity, Cas13b-ADAR fusions with various mutations in the ADAR deaminase domain were assayed on the luciferase target.

[1481] As shown in FIGS. 96-97, a number of V351, T375 and R455 mutants were tested for their ability to catalyze C-to-U deamination activity, and certain V351 mutants having C-to-U activity were further validated. Guide sequence used in construct guide-paring shown FIG. 95 are provided below

| | | Guide sequence | Guide seq + G | Revcom | Top order | Bottom order |
|---|---|---|---|---|---|---|
| | | (SEQ ID | Nos. | (SEQ ID Nos. | (SEQ ID Nos. | (SEQ ID Nos. |
| | | 774-781) | 782-789) | 790-797) | 709-805) | 806-813) |
| GlucA | 50 | ttcatcttgggcgtgc | Gttcatcttgggcgtg | aggggctgtctgatct | caccGttcatcttgggc | caacaggggctgtctgat |
| | | Acttgatgtgggac | cActtgatgtgggac | gcctgtcccacatca | gtgcActtgatgtggg | ctgcctgtcccacatcaag |
| | | aggcagatcagaca | aggcagatcagaca | agtgcacgcccaag | acaggcagatcagaca | tgcacgcccaagatgaac |
| | | gcccct | gcccct | atgaac | gcccct | |
| GlucC | 50 | ttcatcttgggcgtgc | Gttcatcttgggcgtg | aggggctgtctgatct | caccGttcatcttgggc | caacaggggctgtctgat |
| | | Ccttgatgtgggac | cCcttgatgtgggac | gcctgtcccacatca | gtgcCcttgatgtggg | ctgcctgtcccacatcaag |
| | | aggcagatcagaca | aggcagatcagaca | agggcacgcccaag | acaggcagatcagaca | ggcacgcccaagatgaa |
| | | gcccct | gcccct | atgaac | gcccct | c |
| GlucT | 50 | ttcatcttgggcgtgc | Gttcatcttgggcgtg | aggggctgtctgatct | caccGttcatcttgggc | caacaggggctgtctgat |
| | | Tcttgatgtgggaca | cTcttgatgtgggac | gcctgtcccacatca | gtgcTcttgatgtggg | ctgcctgtcccacatcaag |
| | | ggcagatcagacag | aggcagatcagaca | agagcacgcccaag | acaggcagatcagaca | agcacgcccaagatgaa |
| | | cccct | gcccct | atgaac | gcccct | c |
| GlucG | 50 | ttcatcttgggcgtgc | Gttcatcttgggcgtg | aggggctgtctgatct | caccGttcatcttgggc | caacaggggctgtctgat |
| | | Gcttgatgtgggac | cGcttgatgtgggac | gcctgtcccacatca | gtgcGcttgatgtggg | ctgcctgtcccacatcaag |
| | | aggcagatcagaca | aggcagatcagaca | agcgcacgcccaag | acaggcagatcagaca | cgcacgcccaagatgaa |
| | | gcccct | gcccct | atgaac | gcccct | c |
| GlucA | 30 | gcActtgatgtggg | GgcActtgatgtgg | tgtctgatctgcctgtc | caccGgcActtgatgt | caactgtctgatctgcctgt |
| | | acaggcagatcaga | gacaggcagatcag | ccacatcaagtgcc | gggacaggcagatca | cccacatcaagtgcc |
| | | ca | aca | | gaca | |
| GlucC | 30 | gcCcttgatgtggg | GgcCcttgatgtgg | tgtctgatctgcctgtc | caccGgcCcttgatgt | caactgtctgatctgcctgt |
| | | acaggcagatcaga | gacaggcagatcag | ccacatcaagggcc | gggacaggcagatca | cccacatcaagggcc |
| | | ca | aca | | gaca | |
| GlucT | 30 | gcTcttgatgtggg | GgcTcttgatgtgg | tgtctgatctgcctgtc | caccGgcTcttgatgt | caactgtctgatctgcctgt |
| | | acaggcagatcaga | gacaggcagatcag | ccacatcaagagcc | gggacaggcagatca | cccacatcaagagcc |
| | | ca | aca | | gaca | |
| GlucG | 30 | gcGcttgatgtggg | GgcGcttgatgtgg | tgtctgatctgcctgtc | caccGgcGcttgatgt | caactgtctgatctgcctgt |
| | | acaggcagatcaga | gacaggcagatcag | ccacatcaagcgcc | gggacaggcagatca | cccacatcaagcgcc |
| | | ca | aca | | gaca | |

| | | |
|---|---|---|
| PC07 | caccGttcatettgggcgtgcActtgatgtgggacaggcagatcagacagcccct | Guide targeting pAB0212 50bp |

| | | |
|---|---|---|
| 15 | (SEQ ID No. 814) | A flip F v2 |
| PC07 | caccGttcatcttgggcgtgcCcttgatgtgggacaggcagatcagacagcccct | Guide targeting pAB0212 50bp C |
| 16 | (SEQ ID No. 815) | flip F v2 |
| PC07 | caccGttcatcttgggcgtgcTcttgatgtgggacaggcagatcagacagcccct | Guide targeting pAB0212 50bp T |
| 17 | (SEQ ID No. 816) | flip F v2 |
| PC07 | caccGttcatcttgggcgtgcGcttgatgtgggacaggcagatcagacagcccct | Guide targeting pAB0212 50bp |
| 18 | (SEQ ID No. 817) | G flip F v2 |
| PC07 | Guide targeting pAB0212 30bp | |
| 19 | caccGgcActtgatgtgggacaggcagatcagaca(SEQ ID No. 818) | A flip F v2 |
| PC07 | Guide targeting pAB0212 30bp C | |
| 20 | caccGgcCcttgatgtgggacaggcagatcagaca(SEQ ID No. 819) | flip F v2 |
| PC07 | Guide targeting pAB0212 30bp T | |
| 21 | caccGgcTcttgatgtgggacaggcagatcagaca(SEQ ID No. 820) | flip F v2 |
| PC07 | Guide targeting pAB0212 30bp | |
| 22 | caccGgcGcttgatgtgggacaggcagatcagaca(SEQ ID No. 821) | G flip F v2 |
| PC07 | Caacaggggctgtctgatctgcctgtcccacatcaagtgcacgcccaagatgaac | Guide targeting pAB0212 50bp |
| 23 | (SEQ ID No. 822) | A flip R v2 |
| PC07 | Caacaggggctgtctgatctgcctgtcccacatcaagggcacgcccaagatgaac | Guide targeting pAB0212 50bp C |
| 24 | (SEQ ID No. 823) | flip R v2 |
| PC07 | Caacaggggctgtctgatctgcctgtcccacatcaagagcacgcccaagatgaac | Guide targeting pAB0212 50bp T |
| 25 | (SEQ ID No. 824) | flip R v2 |
| PC07 | Caacaggggctgtctgatctgcctgtcccacatcaagcgcacgcccaagatgaac | Guide targeting pAB0212 50bp |
| 26 | (SEQ ID No. 825) | G flip R v2 |
| PC07 | Guide targeting pAB0212 30bp | |
| 27 | Caactgtctgatctgcctgtcccacatcaagtgcc (SEQ ID No. 826) | A flip R v2 |
| PC07 | Guide targeting pAB0212 30bp C | |
| 28 | Caactgtctgatctgcctgtcccacatcaagggcc (SEQ ID No. 827) | flip R v2 |
| PC07 | Guide targeting pAB0212 30bp T | |
| 29 | Caactgtctgatctgcctgtcccacatcaagagcc (SEQ ID No. 828) | flip R v2 |
| PC07 | Guide targeting pAB0212 30bp | |
| 30 | caactgtctgatctgcctgtcccacatcaagcgcc(SEQ ID No. 829) | G flip R v2 |

[1482] Guide sequences used in construct guide-paring show in FIG. 99 are provided below.

| | | | | | Bottom |
|---|---|---|---|---|---|
| | | | | | order |
| | Guide sequence | Guide seq +G | Revcom | | (SEQ ID |
| | (SEQ ID Nos. 830- | (SEQ ID Nos. 846- | (SEQ ID Nos | Top order | Nos. |
| Position | 845) | 861) | 862-877) | (SEQ ID Nos. 878-893) | 894-909) |
| 0 | CTCTTTGTCGCCT | GCTCTTTGTCGCC | cgctgccacacct | caccGCTCTTTGTCG | caaccgctgccacacct |
| | TCGTAGGTGTGG | TTCGTAGGTGTGG | acgaaggcgaca | CCTTCGTAGGTGTG | acgaaggcgacaaaga |
| | CAGCG | CAGCG | aagagc | GCAGCG | gc |
| 6 | GTCGCCTTCGTA | GGTCGCCTTCGTA | ccaggacgctgc | caccGGTCGCCTTCG | caacccaggacgctgc |
| | GGTGTGGCAGCG | GGTGTGGCAGCG | cacacctacgaa | TAGGTGTGGCAGC | cacacctacgaaggcg |
| | TCCTGG | TCCTGG | ggcgacc | GTCCTGG | acc |
| 12 | TTCGTAGGTGTG | GTTCGTAGGTGTG | ttcatcccaggac | caccGTTCGTAGGTG | caacttcatcccaggac |
| | GCAGCGTCCTGG | GCAGCGTCCTGG | gctgccacaccta | TGGCAGCGTCCTGG | gctgccacacctacgaa |
| | GATGAA | GATGAA | cgaac | GATGAA | c |
| 18 | GGTGTGGCAGCG | GGGTGTGGCAGC | aagaagttcatcc | caccGGGTGTGGCAG | caacaagaagttcatcc |
| | TCCTGGGATGAA | GTCCTGGGATGA | caggacgctgcc | CGTCCTGGGATGA | caggacgctgccacac |
| | CTTCTT | ACTTCTT | acaccc | ACTTCTT | cc |
| 24 | GCAGCGTCCTGG | GGCAGCGTCCTG | aagatgaagaagt | caccGGCAGCGTCCT | caacaagatgaagaag |
| | GATGAACTTCTT | GGATGAACTTCTT | tcatcccaggacg | GGGATGAACTTCTT | ttcatcccaggacgctg |
| | CATCTT | CATCTT | ctgcc | CATCTT | cc |
| 30 | TCCTGGGATGAA | GTCCTGGGATGA | acgcccaagatg | caccGTCCTGGGATG | caacacgcccaagatg |
| | CTTCTTCATCTTG | ACTTCTTCATCTT | aagaagttcatcc | AACTTCTTCATCTT | aagaagttcatcccagg |
| | GGCGT | GGGCGT | caggac | GGGCGT | ac |
| 36 | GATGAACTTCTT | GGATGAACTTCTT | aagcgcacgccc | caccGGATGAACTTC | caacaagcgcacgccc |
| | CATCTTGGGCGT | CATCTTGGGCGTG | aagatgaagaagt | TTCATCTTGGGCGT | aagatgaagaagttcat |
| | GCGCTT | CGCTT | tcatcc | GCGCTT | cc |
| 42 | CTTCTTCATCTTG | GCTTCTTCATCTT | cacatcaagcgc | caccGCTTCTTCATCT | caaccacatcaagcgc |
| | GGCGTGCGCTTG | GGGCGTGCGCTT | acgcccaagatg | TGGGCGTGCGCTTG | acgcccaagatgaaga |
| | ATGTG | GATGTG | aagaagc | ATGTG | agc |
| 48 | CATCTTGGGCGT | GCATCTTGGGCGT | ctgtcccacatca | caccGCATCTTGGGC | caacctgtcccacatca |
| | GCGCTTGATGTG | GCGCTTGATGTGG | agcgcacgccca | GTGCGCTTGATGTG | agcgcacgcccaagat |
| | GGACAG | GACAG | agatgc | GGACAG | gc |
| 54 | GGGCGTGCGCTT | GGGGCGTGCGCT | atctgcctgtccca | caccGGGGCGTGCGC | caacatctgcctgtccc |
| | GATGTGGGACAG | TGATGTGGGACA | catcaagcgcac | TTGATGTGGGACA | acatcaagcgcacgcc |
| | GCAGAT | GGCAGAT | gcccc | GGCAGAT | cc |
| 60 | GCGCTTGATGTG | GGCGCTTGATGTG | tgtctgatctgcct | caccGGCGCTTGATG | caccGGCGCTTGATG |
| | GGACAGGCAGAT | GGACAGGCAGAT | gtcccacatcaag | TGGGACAGGCAGA | gtcccacatcaagcgcc |
| | CAGACA | CAGACA | cgcc | TCAGACA | tctgcctgtcccacatcc |
| 66 | GATGTGGGACAG | GGATGTGGGACA | aggggctgtctga | caccGGATGTGGGAC | caacaggggctgtctga |
| | GCAGATCAGACA | GGCAGATCAGAC | tctgcctgtcccac | AGGCAGATCAGAC | |
| | GCCCCT | AGCCCCT | atcc | AGCCCCT | |
| 72 | GGACAGGCAGAT | GGGACAGGCAGA | tgcaccaggggc | caccGGGACAGGCA | caactgcaccaggggc |
| | CAGACAGCCCCT | TCAGACAGCCCCT | tgtctgatctgcct | GATCAGACAGCCC | tgtctgatctgcctgtcc |
| | GGTGCA | GGTGCA | gtccc | CTGGTGCA | c |
| 78 | GCAGATCAGACA | GGCAGATCAGAC | gctggctgcacca | caccGGCAGATCAGA | caacgctggctgcacc |
| | GCCCCTGGTGCA | AGCCCCTGGTGC | ggggctgtctgat | CAGCCCCTGGTGCA | aggggctgtctgatctg |
| | GCCAGC | AGCCAGC | ctgcc | GCCAGC | cc |
| 84 | CAGACAGCCCCT | GCAGACAGCCCC | cggaaagctggc | caccGCAGACAGCCC | caaccggaaagctggc |
| | GGTGCAGCCAGC | TGGTGCAGCCAG | tgcaccaggggc | CTGGTGCAGCCAG | tgcaccaggggctgtct |
| | TTTCCG | CTTTCCG | tgtctgc | CTTTCCG | gc |
| NT | GTAATGCCTGGC | GGTAATGCCTGG | cagactatgcgtc | caccGGTAATGCCTG | caaccagactatgcgtc |
| | TTGTCGACGCAT | CTTGTCGACGCAT | gacaagccaggc | GCTTGTCGACGCAT | gacaagccaggcatta |
| | AGTCTG | AGTCTG | attacc | AGTCTG | cc |

### REFERENCES

[1483] 1. P. D. Hsu, E. S. Lander, F. Zhang, Development and applications of CRISPR-Cas9 for genome engineering. Cell 157, 1262-1278 (2014).
[1484] 2. A. C. Komor, A. H. Badran, D. R. Liu, CRISPR-Based Technologies for the Manipulation of Eukaryotic Genomes. Cell 168, 20-36 (2017).
[1485] 3. L. Cong et al., Multiplex genome engineering using CRISPR/Cas systems. Science 339, 819-823 (2013).
[1486] 4. P. Mali et al., RNA-guided human genome engineering via Cas9. Science 339, 823-826 (2013).
[1487] 5. B. Zetsche et al., Cpf1 is a single RNA-guided endonuclease of a class 2 CRISPR-Cas system. Cell 163, 759-771 (2015).
[1488] 6. H. Kim, J. S. Kim, A guide to genome engineering with programmable nucleases. Nat Rev Genet 15, 321-334 (2014).
[1489] 7. A. C. Komor, Y. B. Kim, M. S. Packer, J. A. Zuris, D. R. Liu, Programmable editing of a target base in genomic DNA without double-stranded DNA cleavage. Nature 533, 420-424 (2016).
[1490] 8. K. Nishida et al., Targeted nucleotide editing using hybrid prokaryotic and vertebrate adaptive immune systems. Science 353, (2016).
[1491] 9. Y. B. Kim et al., Increasing the genome-targeting scope and precision of base editing with engineered Cas9-cytidine deaminase fusions. Nat Biotechnol 35, 371-376 (2017).
[1492] 10. O. O. Abudayyeh et al., C2c2 is a single-component programmable RNA-guided RNA-targeting CRISPR effector. Science 353, aaf5573 (2016).
[1493] 11. S. Shmakov et al., Discovery and Functional Characterization of Diverse Class 2 CRISPR-Cas Systems. Mol Cell 60, 385-397 (2015).
[1494] 12. S. Shmakov et al., Diversity and evolution of class 2 CRISPR-Cas systems. Nat Rev Microbiol 15, 169-182 (2017).
[1495] 13. A. A. Smargon et al., Cas13b Is a Type VI-B CRISPR-Associated RNA-Guided RNase Differentially Regulated by Accessory Proteins Csx27 and Csx28. Mol Cell 65, 618-630 e617 (2017).
[1496] 14. J. S. Gootenberg et al., Nucleic acid detection with CRISPR-Cas13a/C2c2. Science 356, 438-442 (2017).
[1497] 15. O. O. Abudayyeh et al., RNA targeting with CRISPR-Cas13a. Nature in press, (2017).
[1498] 16. K. Nishikura, Functions and regulation of RNA editing by ADAR deaminases. Annu Rev Biochem 79, 321-349 (2010).
[1499] 17. M. H. Tan et al., Dynamic landscape and regulation of RNA editing in mammals. Nature 550, 249-254 (2017)
[1500] 18. B. L. Bass, H. Weintraub, An unwinding activity that covalently modifies its double-stranded RNA substrate. Cell 55, 1089-1098 (1988).
[1501] 19. M. M. Matthews et al., Structures of human ADAR2 bound to dsRNA reveal base-flipping mechanism and basis for site selectivity. Nat Struct Mol Biol 23, 426-433 (2016).
[1502] 20. Y. Zheng, C. Lorenzo, P. A. Beal, DNA editing in DNA/RNA hybrids by adenosine deaminases that act on RNA. Nucleic Acids Res 45, 3369-3377 (2017).
[1503] 21. A. Kuttan, B. L. Bass, Mechanistic insights into editing-site specificity of ADARs. Proc Natl Acad Sci USA 109, E3295-3304 (2012).
[1504] 22. S. K. Wong, S. Sato, D. W. Lazinski, Substrate recognition by ADAR1 and ADAR2. RNA 7, 846-858 (2001).
[1505] 23. M. Fukuda et al., Construction of a guide-RNA for site-directed RNA mutagenesis utilising intracellular A-to-I RNA editing. Sci Rep 7, 41478 (2017).
[1506] 24. M. F. Montiel-Gonzalez, I. Vallecillo-Viejo, G. A. Yudowski, J. J. Rosenthal, Correction of mutations within the cystic fibrosis transmembrane conductance regulator by site-directed RNA editing. Proc Natl Acad Sci USA 110, 18285-18290 (2013).
[1507] 25. M. F. Montiel-Gonzalez, I. C. Vallecillo-Viejo, J. J. Rosenthal, An efficient system for selectively altering genetic information within mRNAs. Nucleic Acids Res 44, e157 (2016).
[1508] 26. J. Wettengel, P. Reautschnig, S. Geisler, P. J. Kahle, T. Stafforst, Harnessing human ADAR2 for RNA repair—Recoding a PINK1 mutation rescues mitophagy. Nucleic Acids Res 45, 2797-2808 (2017).
[1509] 27. Y. Wang, J. Havel, P. A. Beal, A Phenotypic Screen for Functional Mutants of Human Adenosine Deaminase Acting on RNA 1. ACS Chem Biol 10, 2512-2519 (2015).
[1510] 28. K. A. Lehmann, B. L. Bass, Double-stranded RNA adenosine deaminases ADAR1 and ADAR2 have overlapping specificities. Biochemistry 39, 12875-12884 (2000).
[1511] 29. T. Stafforst, M. F. Schneider, An RNA-deaminase conjugate selectively repairs point mutations. Angew Chem Int Ed Engl 51, 11166-11169 (2012).
[1512] 30. C. Ballatore, V. M. Lee, J. Q. Trojanowski, Tau-mediated neurodegeneration in Alzheimer's disease and related disorders. Nat Rev Neurosci 8, 663-672 (2007).
[1513] 31. Y. Li et al., Carriers of rare missense variants in IFIH1 are protected from psoriasis. J Invest Dermatol 130, 2768-2772 (2010).
[1514] 32. R. S. Finkel et al., Treatment of infantile-onset spinal muscular atrophy with nusinersen: a phase 2, open-label, dose-escalation study. Lancet 388, 3017-3026 (2016).
[1515] 33. J. Joung et al., Genome-scale CRISPR-Cas9 knockout and transcriptional activation screening. Nat Protoc 12, 828-863 (2017).
[1516] 34. B. Li, C. N. Dewey, RSEM: accurate transcript quantification from RNA-Seq data with or without a reference genome. BMC Bioinformatics 12, 323 (2011).
[1517] 35. E. Picardi, A. M. D'Erchia, A. Montalvo, G. Pesole, Using REDItools to Detect RNA Editing Events in NGS Datasets. Curr Protoc Bioinformatics 49, 12 12 11-15 (2015).
[1518] 36. E. Picardi, G. Pesole, REDItools: high-throughput RNA editing detection made easy. Bioinformatics 29, 1813-1814 (2013).
[1519] 37. G. Glusman, J. Caballero, D. E. Mauldin, L. Hood, J. C. Roach, Kaviar: an accessible system for testing SNV novelty. Bioinformatics 27, 3216-3217 (2011).
[1520] 38. J. D. Watson, Molecular biology of the gene. (Pearson, Boston, ed. Seventh edition, 2014), pp. xxxiv, 872 pages.
[1521] 39. R. C. Ferreira et al., Association of IFIH1 and other autoimmunity risk alleles with selective IgA deficiency. Nat Genet 42, 777-780 (2010).

[1522] The invention further relates to the following aspects, which are described hereinbelow as numbered statements:

[1523] 1. A method of modifying an Adenine in a target RNA sequence of interest, comprising delivering to said target RNA:

(a) a catalytically inactive (dead) Cas13 protein;
(b) a guide molecule which comprises a guide sequence linked to a direct repeat sequence; and
(c) an adenosine deaminase protein or catalytic domain thereof;
wherein said adenosine deaminase protein or catalytic domain thereof is covalently or non-covalently linked to said dead Cas13 protein or said guide molecule or is adapted to link thereto after delivery;
wherein guide molecule forms a complex with said dead Cas13 protein and directs said complex to bind said target RNA sequence of interest, wherein said guide sequence is capable of hybridizing with a target sequence comprising said Adenine to form an RNA duplex, wherein said guide sequence comprises a non-pairing Cytosine at a position corresponding to said Adenine resulting in an A-C mismatch in the RNA duplex formed;
wherein said adenosine deaminase protein or catalytic domain thereof deaminates said Adenine in said RNA duplex.

[1524] 2. The method of statement 1, wherein said Cas13 protein is Cas13a, Cas13b or Cas 13c.

[1525] 3. The method of statement 1, wherein said adenosine deaminase protein or catalytic domain thereof is fused to N- or C-terminus of said dead Cas13 protein.

[1526] 4. The method of statement 3, wherein said adenosine deaminase protein or catalytic domain thereof is fused to said dead Cas13 protein by a linker.

[1527] 5. The method of statement 4, wherein said linker is (GGGGS)₃₋₁₁, GSG₅ or LEPGEKPYKCPECGKSFSQSGALTRHQRTHTR, or wherein said linker is an XTEN linker.

[1528] 6. The method of statement 1, wherein said adenosine deaminase protein or catalytic domain thereof is linked to an adaptor protein and said guide molecule or said dead Cas13 protein comprises an aptamer sequence capable of binding to said adaptor protein.

[1529] 7. The method of statement 6, wherein said adaptor sequence is selected from MS2, PP7, Qβ, F2, GA, fr, JP501, M12, R17, BZ13, JP34, JP500, KU1, M11, MX1, TW18, VK, SP, FI, ID2, NL95, TW19, AP205, ϕCb5, ϕCb8r, ϕCb12r, ϕCb23r, 7s and PRR1.

[1530] 8. The method of statement 1, wherein said adenosine deaminase protein or catalytic domain thereof is inserted into an internal loop of said dead Cas13 protein.

[1531] 9. The method of statement 8, wherein said Cas13 protein is a Cas13a protein and said Cas13a comprises one or more mutations the two HEPN domains, particularly at postion R474 and R1046 of Cas 13a protein originating from Leptotrichia wadei or amino acid positions corresponding thereto of a Cas13a ortholog.

[1532] 10. The method of statement 9, wherein said Cas13 protein is a Cas13b protein and said Cas13b comprises a mutation in one or more of positions R116, H121, R1177, H1182 of Cas13b protein originating from Bergeyella zoohelcum ATCC 43767 or amino acid positions corresponding thereto of a Cas13b ortholog.

[1533] 11. The method of statement, wherein said mutation is one or more of R16A, H121A, R177A, H182A of Cas13b protein originating from Bergeyella zoohelcum ATCC 43767 or amino acid positions corresponding thereto of a Cas3b ortholog.

[1534] 12. The method of any of statement 1, wherein said guide sequence has a length of about 20-53 nt, preferably 25-53 nt, more preferably 29-53 nt capable of forming said RNA duplex with said target sequence.

[1535] 13. The method of any of statement 12, wherein said guide sequence has a length of about 40-50 nt capable of forming said RNA duplex with said target sequence.

[1536] 14. The method of statement 1, wherein the distance between said non-pairing C and the 5′ end of said guide sequence is 20-30 nucleotides.

[1537] 15. The method of any of the preceding statements, wherein said adenosine deaminase protein or catalytic domain thereof is a human, cephalopod, or Drosophila adenosine deaminase protein or catalytic domain thereof.

[1538] 16. The method of statement 1, wherein said adenosine deaminase protein or catalytic domain thereof has been modified to comprise a mutation at glutamic acid⁴⁸⁸ of the hADAR2-D amino acid sequence, or a corresponding position in a homologous ADAR protein.

[1539] 17. The method of statement 16, wherein said glutamic acid residue at position 488 or a corresponding position in a homologous ADAR protein is replaced by a glutamine residue (E488Q).

[1540] 18. The method of statement 16 or 17, wherein said adenosine deaminase protein or catalytic domain thereof is a mutated hADAR2d comprising mutation E488Q or a mutated hADAR1d comprising mutation E1008Q.

[1541] 19. The method of any of the preceding statements wherein the guide sequence comprises more than one mismatch corresponding to different adenosine sites in the target RNA sequence or wherein two guide molecules are used, each comprising a mismatch corresponding to a different adenosine sites in the target RNA sequence.

[1542] 20. The method of any of the preceding statements, wherein said Cas13 protein and optionally said adenosine deaminase protein or catalytic domain thereof comprise one or more heterologous nuclear localization signal(s) (NLS(s)).

[1543] 21. The method of any of the preceding statements, wherein said method comprises, determining said target sequence of interest and selecting said adenosine deaminase protein or catalytic domain thereof which most efficiently deaminates said Adenine present in said target sequence.

[1544] 22. The method of any of the preceding statements, wherein said catalytically inactive Cas13 protein is obtained from a Cas13 nuclease derived from a bacterial species selected from the group consisting of the bacterial species listed in any of Tables 1, 2, 3, or 4.

[1545] 23. The method of any of the preceding statements, wherein said target RNA sequence of interest is within a cell.

[1546] 24. The method of statement 23, wherein said cell is a eukaryotic cell.

[1547] 25. The method of statement 24, wherein said cell is a non-human animal cell.

[1548] 26. The method of statement 24, wherein said cell is a human cell.

[1549] 27. The method of statement 24, wherein said cell is a plant cell.

[1550] 28. The method of any of the preceding statements, wherein said target locus of interest is within an animal.

[1551] 29. The method of any of the preceding statements, wherein said target locus of interest is within a plant.

[1552] 30. The method of any of the preceding statements, wherein said target RNA sequence of interest is comprised in an RNA polynucleotide in vitro.

[1553] 31. The method of any of the preceding statements, wherein said components (a), (b) and (c) are delivered to said cell as a ribonucleoprotein complex.

[1554] 32. The method of any of the preceding statements, wherein said components (a), (b) and (c) are delivered to said cell as one or more polynucleotide molecules.

[1555] 33. The method of statement 32, wherein said one or more polynucleotide molecules comprise one or more mRNA molecules encoding components (a) and/or (c).

[1556] 34. The method of statement 33, wherein said one or more polynucleotide molecules are comprised within one or more vectors.

[1557] 35. The method of statement 34, wherein said one or more polynucleotide molecules comprise one or more regulatory elements operably configured to express said Cas13 protein, said guide molecule, and said adenosine deaminase protein or catalytic domain thereof, optionally wherein said one or more regulatory elements comprise inducible promoters.

[1558] 36. The method of statement 32, wherein said one or more polynucleotide molecules or said ribonucleoprotein complex are delivered via particles, vesicles, or one or more viral vectors.

[1559] 37. The method of statement 36, wherein said particles comprise a lipid, a sugar, a metal or a protein.

[1560] 38. The method of statement 37, wherein said particles comprise lipid nanoparticles.

[1561] 39. The method of statement 36, wherein said vesicles comprise exosomes or liposomes.

[1562] 40. The method of statement 34, wherein said one or more viral vectors comprise one or more of adenovirus, one or more lentivirus or one or more adeno-associated virus.

[1563] 41. The method of any of the preceding statements, where said method modifies a cell, a cell line or an organism by manipulation of one or more target RNA sequences.

[1564] 42. The method of statement 41, wherein said deamination of said Adenine in said target RNA of interest remedies a disease caused by transcripts containing a pathogenic G→A or C→T point mutation.

[1565] 43. The method of statement 42, wherein said disease is selected from Meier-Gorlin syndrome, Seckel syndrome 4, Joubert syndrome 5, Leber congenital amaurosis 10; Charcot-Marie-Tooth disease, type 2; Charcot-Marie-Tooth disease, type 2; Usher syndrome, type 2C; Spinocerebellar ataxia 28; Spinocerebellar ataxia 28; Spinocerebellar ataxia 28; Long QT syndrome 2; Sjgren-Larsson syndrome; Hereditary fructosuria; Hereditary fructosuria; Neuroblastoma; Neuroblastoma; Kallmann syndrome 1; Kallmann syndrome 1; Kallmann syndrome 1; Metachromatic leukodystrophy, Rett syndrome, Amyotrophic lateral sclerosis type 10, Li-Fraumeni syndrome, or a disease listed in Table 5.

[1566] 44. The method of statement 42, wherein said disease is a premature termination disease.

[1567] 45. The method of statement 41, wherein said modification affects the fertility of an organism.

[1568] 46. The method of statement 41, wherein said modification affects splicing of said target RNA sequence.

[1569] 47. The method of statement 41, wherein said modification introduces a mutation in a transcript introducing an amino acid change and causing expression of a new antigen in a cancer cell.

[1570] 48. The method of statement 41, wherein said target RNA is comprised within a microRNA.

[1571] 49. The method of statement 41, wherein said deamination of said Adenine in said target RNA of interest causes a gain of function or a loss of function of a gene.

[1572] 50. The method of statement 49, wherein said gene is a gene expressed by a cancer cell.

[1573] 51. A modified cell obtained from the method of any of the preceding statements, or progeny of said modified cell, wherein said cell comprises a hypoxanthine or a guanine in replace of said Adenine in said target RNA of interest compared to a corresponding cell not subjected to the method.

[1574] 52. The modified cell or progeny thereof of statement 51, wherein said cell is a eukaryotic cell.

[1575] 53. The modified cell or progeny thereof of statement 51, wherein said cell is an animal cell.

[1576] 54. The modified cell or progeny thereof of statement 51, wherein said cell is a human cell.

[1577] 55. The modified cell or progeny thereof of statement 51, wherein said cell is a therapeutic T cell.

[1578] 56. The modified cell or progeny thereof of statement 51, wherein said cell is an antibody-producing B cell.

[1579] 57. The modified cell or progeny thereof of statement 51, wherein said cell is a plant cell.

[1580] 58. A non-human animal comprising said modified cell of statement 51.

[1581] 59. A plant comprising said modified cell of statement 58.

[1582] 60. A method for cell therapy, comprising administering to a patient in need thereof said modified cell of any of statements 51-55, wherein presence of said modified cell remedies a disease in the patient.

[1583] 61. An engineered, non-naturally occurring system suitable for modifying an Adenine in a target locus of interest, comprising

a) a guide molecule which comprises a guide sequence linked to a direct repeat sequence, or a nucleotide sequence encoding said guide molecule;
b) a catalytically inactive Cas13 protein, or a nucleotide sequence encoding said catalytically inactive Cas13 protein;
c) an adenosine deaminase protein or catalytic domain thereof, or a nucleotide sequence encoding said adenosine deaminase protein or catalytic domain thereof,
wherein said adenosine deaminase protein or catalytic domain thereof is covalently or non-covalently linked to said Cas13 protein or said guide molecule or is adapted to link thereto after delivery;
wherein said guide sequence is capable of hybridizing with a target RNA sequence comprising an Adenine to form an RNA duplex, wherein said guide sequence comprises a non-pairing Cytosine at a position corresponding to said Adenine resulting in an A-C mismatch in the RNA duplex formed.

[1584] 62. An engineered, non-naturally occurring vector system suitable for modifying an Adenine in a target locus of interest, comprising the nucleotide sequences of a), b) and c) of statement 61.

[1585] 63. The engineered, non-naturally occurring vector system of statement 62, comprising one or more vectors comprising:

a) a first regulatory element operably linked to a nucleotide sequence encoding said guide molecule which comprises said guide sequence,
b) a second regulatory element operably linked to a nucleotide sequence encoding said catalytically inactive Cas13 protein; and
c) a nucleotide sequence encoding an adenosine deaminase protein or catalytic domain thereof which is under control of said first or second regulatory element or operably linked to a third regulatory element;
wherein, if said nucleotide sequence encoding an adenosine deaminase protein or catalytic domain thereof is operably linked to a third regulatory element, said adenosine deaminase protein or catalytic domain thereof is adapted to link to said guide molecule or said Cas13 protein after expression;
wherein components (a), (b) and (c) are located on the same or different vectors of the system.

[1586] 64. An in vitro or ex vivo host cell or progeny thereof or cell line or progeny thereof comprising the system of any of statements 61-63.

[1587] 65. The host cell or progeny thereof or cell line or progeny thereof of statement 64, wherein said cell is a eukaryotic cell.

[1588] 66. The host cell or progeny thereof or cell line or progeny thereof of statement 64, wherein said cell is an animal cell.

[1589] 67. The host cell or progeny thereof or cell line or progeny thereof of statement 64, wherein said cell is a human cell.

[1590] 68. The host cell or progeny thereof or cell line or progeny thereof of statement 64, wherein said cell is a plant cell.

[1591] 69. The method according to statement 1, wherein said cytosine is not 5′ flanked by guanosine.

[1592] 70. The method according to statement 1, wherein said adenosine deaminase is ADAR, optionally huADAR, optionally (hu)ADAR1 or (hu)ADAR2, preferably huADAR2.

[1593] 71. The method according to statement 1, wherein said Cas13, preferably Cas13b, is truncated, preferably C-terminally truncated, preferably wherein said Cas 13 is a truncated functional variant of the corresponding wild type Cas13.

[1594] 72. The method according to statement 1, wherein said adenosine deaminase is capable of deaminating adenosine in RNA or is an RNA specific adenosine deaminase.

[1595] 73. The method according to statement 1 or 16, wherein said adenosine deaminase protein or catalytic domain thereof has been modified to comprise one or more mutation of the ADAR, preferably a mutation as described herein, for instance a mutation as provided in any of FIGS. 43-47, or a corresponding mutation in an ADAR homologue or orthologue.

[1596] The present disclosure is not to be limited in terms of the particular embodiments described in this application. Many modifications and variations can be made without departing from its spirit and scope, as will be apparent to those skilled in the art. Functionally equivalent methods and compositions within the scope of the disclosure, in addition to those enumerated herein, will be apparent to those skilled in the art from the foregoing descriptions. Such modifications and variations are intended to fall within the scope of the appended claims. The present disclosure is to be limited only by the terms of the appended claims, along with the full scope of equivalents to which such claims are entitled. It is to be understood that this disclosure is not limited to particular methods, reagents, compounds compositions or biological systems, which can of course vary. It is also to be understood that the terminology used herein is for the purpose of describing particular embodiments only, and is not intended to be limiting.

[1597] In addition, where features or aspects of the disclosure are described in terms of Markush groups, those skilled in the art will recognize that the disclosure is also thereby described in terms of any individual member or subgroup of members of the Markush group.

[1598] Other embodiments are set forth in the following claims.

The application's sequence listing, which the Patent Office published only in electronic form, follows.

SEQUENCE LISTING (919 sequences)

SEQ ID NO: 1 - protein, 15 aa, Artificial Sequence
  Synthetic
GGGGSGGGGSGGGGS

SEQ ID NO: 2 - protein, 20 aa, Artificial Sequence
  Synthetic
GGGGSGGGGSGGGGSGGGGS

SEQ ID NO: 3 - protein, 25 aa, Artificial Sequence
  Synthetic
GGGGSGGGGSGGGGSGGGGSGGGGS

SEQ ID NO: 4 - protein, 30 aa, Artificial Sequence
  Synthetic
GGGGSGGGGSGGGGSGGGGSGGGGSGGGGS

SEQ ID NO: 5 - protein, 35 aa, Artificial Sequence
  Synthetic
GGGGSGGGGSGGGGSGGGGSGGGGSGGGGSGGGGS

SEQ ID NO: 6 - protein, 40 aa, Artificial Sequence
  Synthetic
GGGGSGGGGSGGGGSGGGGSGGGGSGGGGSGGGGSGGGGS

SEQ ID NO: 7 - protein, 45 aa, Artificial Sequence
  Synthetic
GGGGSGGGGSGGGGSGGGGSGGGGSGGGGSGGGGSGGGGSGGGGS

SEQ ID NO: 8 - protein, 50 aa, Artificial Sequence
  Synthetic
GGGGSGGGGSGGGGSGGGGSGGGGSGGGGSGGGGSGGGGSGGGGSGGGGS

SEQ ID NO: 9 - protein, 55 aa, Artificial Sequence
  Synthetic
GGGGSGGGGSGGGGSGGGGSGGGGSGGGGSGGGGSGGGGSGGGGSGGGGSGGGGS

SEQ ID NO: 10 - protein, 15 aa, Artificial Sequence
  Synthetic
GSGGSGGSGGSGGSG

SEQ ID NO: 11 - protein, 32 aa, Artificial Sequence
  Synthetic
LEPGEKPYKCPECGKSFSQSGALTRHQRTHTR

SEQ ID NO: 12 - protein, 9 aa, Artificial Sequence
  Synthetic
GGSGGSGGS

SEQ ID NO: 13 - protein, 60 aa, Artificial Sequence
  Synthetic
GGGGSGGGGSGGGGSGGGGSGGGGSGGGGSGGGGSGGGGSGGGGSGGGGSGGGGSGGGGS

SEQ ID NO: 14 - protein, 5 aa, Artificial Sequence
  Synthetic
GGGGS

SEQ ID NO: 15 - protein, 10 aa, Artificial Sequence
  Synthetic
GGGGSGGGGS

SEQ ID NO: 16 - protein, 20 aa, Artificial Sequence
  Synthetic
PKKKRKVEASSPKKRKVEAS

SEQ ID NO: 17 - protein, 7 aa, Simian Virus 40
PKKKRKV

SEQ ID NO: 18 - protein, 10 aa, Artificial Sequence
  Synthetic
PKKKRKVEAS

SEQ ID NO: 19 - protein, 16 aa, Artificial Sequence
  Synthetic
KRPAATKKAGQAKKKK

SEQ ID NO: 20 - protein, 9 aa, Artificial Sequence
  Synthetic
PAAKRVKLD

SEQ ID NO: 21 - protein, 11 aa, Artificial Sequence
  Synthetic
RQRRNELKRSP

SEQ ID NO: 22 - protein, 38 aa, Artificial Sequence
  Synthetic
NQSSNFGPMKGGNFGGRSSGPYGGGGQYFAKPRNQGGY

SEQ ID NO: 23 - protein, 42 aa, Artificial Sequence
  Synthetic
RMRIZFKNKGKDTAELRRRRVEVSVELRKAKKDEQILKRRNV

SEQ ID NO: 24 - protein, 8 aa, Artificial Sequence
  Synthetic
VSRKRPRP

SEQ ID NO: 25 - protein, 8 aa, Artificial Sequence
  Synthetic
PPKKARED

SEQ ID NO: 26 - protein, 8 aa, Homo sapiens
PQPKKKPL

SEQ ID NO: 27 - protein, 12 aa, Mus
SALIKKKKKMAP

SEQ ID NO: 28 - protein, 5 aa, Influenza virus
DRLRR

SEQ ID NO: 29 - protein, 7 aa, Influenza virus
PKQKKRK

SEQ ID NO: 30 - protein, 10 aa, Hepatitis virus
RKLKKKIKKL

SEQ ID NO: 31 - protein, 10 aa, Mus
REKKKFLKRR

SEQ ID NO: 32 - protein, 20 aa, Homo sapiens
KRKGDEVDGVDEVAKKKSKK

SEQ ID NO: 33 - protein, 17 aa, Homo sapiens
RKCLQAGMNLEARKTKK

SEQ ID NO: 34 - protein, 1340 aa, Lachnospiracea sp
MQISKVNHKHVAVGQKDRERITGFIYNDPVGDEKSLEDVVAKRANDTKVLFNVFNTKDLYDSQESDKSEKDKEIISKGAKFVAKSFNSAITILKKQNKIYSTLTSQQVIKELKDKFGGARIYDDDIEEALTETLKKSFRKENVRNSIKVLIENAAGIRSSLSKDEEELIQEYFVKQLVEEYTKTKLQKNVVKSIKNQNMVIQPDSDSQVLSLSESRREKQSSAVSSDTLVNCKEKDVLKAFLTDYAVLDEDERNSLLWKLRNLVNLYFYGSESIRDYSYTKEKSVWKEHDEQKANKTLFIDEICHITKIGKNGKEQKVLDYEENRSRCRKQNINYYRSALNYAKNNTSGIFENEDSNHFWIHLIENEVERLYNGIENGEEFKFETGYISEKVWKAVINHLSIKYIALGKAVYNYAMKELSSPGDIEPGKIDDSYINGITSFDYEIIKAEESLQRDISMNVVFATNYLACATVDTDKDFLLFSKEDIRSCTKKDGNLCKNIMQFWGGYSTWKNFCEEYLKDDKDALELLYSLKSMLYSMRNSSFHFSTENVDNGSWDTELIGKLFEEDCNRAARIEKEKFYNNNLHMFYSSSLLEKVLERLYSSHHERASQVPSFNRVFVRKNFPSSLSEQRITPKFTDSKDEQIWQSAVYYLCKEIYYNDFLQSKEAYKLFREGVKNLDKNDINNQKAADSFKQAVVYYGKAIGNATLSQVCQAIMTEYNRQNNDGLKKKSAYAEKQNSNKYKHYPLFLKQVLQSAFWEYLDENKEIYGFISAQIHKSNVEIKAEDFIANYSSQQYKKLVDKVKKTPELQKWYTLGRLINPRQANQFLGSIRNYVQFVKDIQRRAKENGNPIRNYYEVLESDSIIKILEMCTKLNGTTSNDIHDYFRDEDEYAEYISQFVNFGDVHSGAALNAFCNSESEGKKNGIYYDGINPIVNRNWVLCKLYGSPDLISKIISRVNENMIHDFHKQEDLIREYQIKGICSNKKEQQDLRTFQVLKNRVELRDIVEYSEIINELYGQLIKWCYLRERDLMYFQLGFHYLCLNNASSKEADYIKINVDDRNISGAILYQIAAMYINGLPVYYKKDDMYVALKSGKKASDELNSNEQTSKKINYFLKYGNNILGDKKDQLYLAGLELFENVAEHENIIIFRNEIDHFHYFYDRDRSMLDLYSEVFDRFFTYDMKLRKNVVNMLYNILLDHNIVSSFVFETGEKKVGRGDSEVIKPSAKIRLRANNGVSSDVFTYKVGSKDELKIATLPAKNEEFLLNVARLIYYPDMEAVSENMVREGVVKVEKSNDKKGKISRGSNTRSSNQSKYNNKSKNRMNYSMGSIFEKMDLKFD

SEQ ID NO: 35 - protein, 1437 aa, Lachnospiracea NK4A179
MKISKVREENRGAKLTVNAKTAVVSENRSQEGILYNDPSRYGKSRKNDEDRDRYIESRLKSSGKLYRIFNEDKNKRETDELQWFLSEIVKKINRRNGLVLSDMLSVDDRAFEKAFEKYAELSYTNRRNKVSGSPAFETCGVDAATAERLKGIISETNFINRIKNNIDNKVSEDIIDRIIAKYLKKSLCRERVKRGLKKLLMNAFDLPYSDPDIDVQRDFIDYVLEDFYHVRAKSQVSRSIKNMNMPVQPEGDGKFAITVSKGGTESGNKRSAEKEAFKKFLSDYASLDERVRDDMLRRMRRLVVLYFYGSDDSKLSDVNEKFDVWEDHAARRVDNREFIKLPLENKLANGKTDKDAERIRKNTVKELYRNQNIGCYRQAVKAVEEDNNGRYFDDKMLNMFFIHRIEYGVEKIYANLKQVTEFKARTGYLSEKIWKDLINYISIKYIAMGKAVYNYAMDELNASDKKEIELGKISEEYLSGISSFDYELIKAEEMLQRETAVYVAFAARHLSSQTVELDSENSDFLLLKPKGTMDKNDKNKLASNNILNFLKDKETLRDTILQYFGGHSLWTDFPFDKYLAGGKDDVDFLTDLKDVIYSMRNDSFHYATENHNNGKWNKELISAMFEHETERMTVVMKDKFYSNNLPMFYKNDDLKKLLIDLYKDNVERASQVPSFNKVFVRKNFPALVRDKDNLGIELDLKADADKGENELKFYNALYYMFKEIYYNAFLNDKNVRERFITKATKVADNYDRNKERNLKDRIKSAGSDEKKKLREQLQNYIAENDFGQRIKNIVQVNPDYTLAQICQLIMTEYNQQNNGCMQKKSAARKDINKDSYQHYKMLLLVNLRKAFLEFIKENYAFVLKPYKHDLCDKADFVPDFAKYVKPYAGLISRVAGSSELQKWYIVSRFLSPAQANHMLGFLHSYKQYVWDIYRRASETGTEINHSIAEDKIAGVDITDVDAVIDLSVKLCGTISSEISDYFKDDEVYAEYISSYLDFEYDGGNYKDSLNRFCNSDAVNDQKVALYYDGEHPKLNRNIILSKLYGERRFLEKITDRVSRSDIVEYYKLKKETSQYQTKGIFDSEDEQKNIKKFQEMKNIVEFRDLMDYSEIADELQGQLINWIYLRERDLMNFQLGYHYACLNNDSNKQATYVTLDYQGKKNRKINGAILYQICAMYINGLPLYYVDKDSSEWTVSDGKESTGAKIGEFYRYAKSFENTSDCYASGLEIFENISEHDNITELRNYIEHFRYYSSFDRSFLGIYSEVFDRFFTYDLKYRKNVPTILYNILLQHFVNVRFEFVSGKKMIGIDKKDRKIAKEKECARITIREKNGVYSEQFTYKLKNGTVYVDARDKRYLQSIIRLLFYPEKVNMDEMIEVKEKKKPSDNNTGKGYSKRDRQQDRKEYDKYKEKKKKEGNFLSGMGGNINWDEINAQLKN

SEQ ID NO: 36 - protein, 1385 aa, Clostridium aminophilum
MKFSKVDHTRSAVGIQKATDSVHGMLYTDPKKQEVNDLDKRFDQLNVKAKRLYNVFNQSKAEEDDDEKRFGKVVKKLNRELKDLLFHREVSRYNSIGNAKYNYYGIKSNPEEIVSNLGMVESLKGERDPQKVISKLLLYYLRKGLKPGTDGLRMILEASCGLRKLSGDEKELKVFLQTLDEDFEKKTFKKNLIRSIENQNMAVQPSNEGDPIIGITQGRFNSQKNEEKSAIERMMSMYADLNEDHREDVLRKLRRLNVLYFNVDTEKTEEPTLPGEVDTNPVFEVWHDHEKGKENDRQFATFAKILTEDRETRKKEKLAVKEALNDLKSAIRDHNIMAYRCSIKVTEQDKDGLFFEDQRINRFWIHHIESAVERILASINPEKLYKLRIGYLGEKVWKDLLNYLSIKYIAVGKAVFHFAMEDLGKTGQDIELGKLSNSVSGGLTSFDYEQIRADETLQRQLSVEVAFAANNLFRAVVGQTGKKIEQSKSEENEEDFLLWKAEKIAESIKKEGEGNTLKSILQFFGGASSWDLNHFCAAYGNESSALGYETKFADDLRKAIYSLRNETFHFTTLNKGSFDWNAKLIGDMFSHEAATGIAVERTRFYSNNLPMFYRESDLKRIMDHLYNTYHPRASQVPSFNSVFVRKNFRLFLSNTLNTNTSFDTEVYQKWESGVYYLFKEIYYNSFLPSGDAHHLFFEGLRRIRKEADNLPIVGKEAKKRNAVQDFGRRCDELKNLSLSAICQMIMTEYNEQNNGNRKVKSTREDKRKPDIFQHYKMLLLRTLQEAFAIYIRREEFKFIFDLPKTLYVMKPVEEFLPNWKSGMFDSLVERVKQSPDLQRWYVLCKFLNGRLLNQLSGVIRSYIQFAGDIQRRAKANHNRLYMDNTQRVEYYSNVLEVVDFCIKGTSRFSNVFSDYFRDEDAYADYLDNYLQFKDEKIAEVSSFAALKTFCNEEEVKAGIYMDGENPVMQRNIVMAKLFGPDEVLKNVVPKVTREEIEEYYQLEKQIAPYRQNGYCKSEEDQKKLLRFQRIKNRVEFQTITEFSEIINELLGQLISWSFLRERDLLYFQLGFHYLCLHNDTEKPAEYKEISREDGTVIRNAILHQVAAMYVGGLPVYTLADKKLAAFEKGEADCKLSISKDTAGAGKKIKDFFRYSKYVLIKDRMLTDQNQKYTIYLAGLELFENTDEHDNITDVRKYVDHFKYYATSDENAMSILDLYSEIHDRFFTYDMKYQKNVANMLENILLRHFVLIRPEFFTGSKKVGEGKKITCKARAQIEIAENGMRSEDFTYKLSDGKKNISTCMIAARDQKYLNTVARLLYYPHEAKKSIVDTREKKNNKKTNRGDGTFNKQKGTARKEKDNGPREFNDTGFSNTPFAGFDPFRNS

SEQ ID NO: 37 - protein, 1175 aa, Carnobacterium gallinarum
MRITKVKIKLDNKLYQVTMQKEEKYGTLKLNEESRKSTAEILRLKKASFNKSFHSKTINSQKENKNATIKKNGDYISQIFEKLVGVDTNKNIRKPKMSLTDLKDLPKKDLALFIKRKFKNDDIVEIKNLDLISLFYNALQKVPGEHFTDESWADFCQEMMPYREYKNKFIERKIILLANSIEQNKGFSINPETFSKRKRVLHQWAIEVQERGDFSILDEKLSKLAEIYNFKKMCKRVQDELNDLEKSMKKGKNPEKEKEAYKKQKNFKIKTIWKDYPYKTHIGLIEKIKENEELNQFNIEIGKYFEHYFPIKKERCTEDEPYYLNSETIATTVNYQLKNALISYLMQIGKYKQFGLENQVLDSKKLQEIGIYEGFQTKFMDACVFATSSLKNIIEPMRSGDILGKREFKEAIATSSFVNYHHFFPYFPFELKGMKDRESELIPFGEQTEAKQMQNIWALRGSVQQIRNEIFHSFDKNQKFNLPQLDKSNFEFDASENSTGKSQSYIETDYKFLFEAEKNQLEQFFIERIKSSGALEYYPLKSLEKLFAKKEMKFSLGSQVVAFAPSYKKLVKKGHSYQTATEGTANYLGLSYYNRYELKEESFQAQYYLLKLIYQYVFLPNFSQGNSPAFRETVKAILRINKDEARKKMKKNKKFLRKYAFEQVREMEFKETPDQYMSYLQSEMREEKVRKAEKNDKGFEKNITMNFEKLLMQIFVKGFDVFLTTFAGKELLLSSEEKVIKETEISLSKKINEREKTLKASIQVEHQLVATNSAISYWLFCKLLDSRHLNELRNEMIKFKQSRIKFNHTQHAELIQNLLPIVELTILSNDYDEKNDSQNVDVSAYFEDKSLYETAPYVQTDDRTRVSFRPILKLEKYHTKSLIEALLKDNPQFRVAATDIQEWMHKREEIGELVEKRKNLHTEWAEGQQTLGAEKREEYRDYCKKIDRFNWKANKVTLTYLSQLHYLITDLLGRMVGFSALFERDLVYFSRSFSELGGETYHISDYKNLSGVLRLNAEVKPIKIKNIKVIDNEENPYKGNEPEVKPFLDRLHAYLENVIGIKAVHGKIRNQTAHLSVLQLELSMIESMNNLRDLMAYDRKLKNAVTKSMIKILDKHGMILKLKIDENHKNFEIESLIPKEIIHLKDKAIKTNQVSEEYCQLVLALLTTNPGNQLN

SEQ ID NO: 38 - protein, 1164 aa, Carnobacterium gallinarum
MRMTKVKINGSPVSMNRSKLNGHLVWNGTTNTVNILTKKEQSFAASFLNKTLVKADQVKGYKVLAENIFIIFEQLEKSNSEKPSVYLNNIRRLKEAGLKRFFKSKYHEEIKYTSEKNQSVPTKLNLIPLFFNAVDRIQEDKFDEKNWSYFCKEMSPYLDYKKSYLNRKKEILANSIQQNRGFSMPTAEEPNLLSKRKQLFQQWAMKFQESPLIQQNNFAVEQFNKEFANKINELAAVYNVDELCTAITEKLMNFDKDKSNKTRNFEIKKLWKQHPHNKDKALIKLFNQEGNEALNQFNIELGKYFEHYFPKTGKKESAESYYLNPQTIIKTVGYQLRNAFVQYLLQVGKLHQYNKGVLDSQTLQEIGMYEGFQTKFMDACVFASSSLRNIIQATTNEDILTREKFKKELEKNVELKHDLFFKTEIVEERDENPAKKIAMTPNELDLWAIRGAVQRVRNQIFHQQINKRHEPNQLKVGSFENGDLGNVSYQKTIYQKLFDAEIKDIEIYFAEKIKSSGALEQYSMKDLEKLFSNKELTLSLGGQVVAFAPSYKKLYKQGYFYQNEKTIELEQFTDYDFSNDVFKANYYLIKLIYHYVFLPQFSQANNKLFKDTVHYVIQQNKELNTTEKDKKNNKKIRKYAFEQVKLMKNESPEKYMQYLQREMQEERTIKEAKKTNEEKPNYNFEKLLIQIFIKGFDTFLRNFDLNLNPAEELVGTVKEKAEGLRKRKERIAKILNVDEQIKTGDEEIAFWIFAKLLDARHLSELRNEMIKFKQSSVKKGLIKNGDLIEQMQPILELCILSNDSESMEKESFDKIEVFLEKVELAKNEPYMQEDKLTPVKFRFMKQLEKYQTRNFIENLVIENPEFKVSEKIVLNWHEEKEKIADLVDKRTKLHEEWASKAREIEEYNEKIKKNKSKKLDKPAEFAKFAEYKIICEAIENFNRLDHKVRLTYLKNLHYLMIDLMGRMVGFSVLFERDFVYMGRSYSALKKQSIYLNDYDTFANIRDWEVNENKHLFGTSSSDLTFQETAEFKNLKKPMENQLKALLGVTNHSFEIRNNIAHLHVLRNDGKGEGVSLLSCMNDLRKLMSYDRKLKNAVTKAIIKILDKHGMILKLTNNDHTKPFEIESLKPKKIIHLEKSNHSFPMDQVSQEYCDLVKKMLVFTN

SEQ ID NO: 39 - protein, 1154 aa, Paludibacter propionicigenes
MRVSKVKVKDGGKDKMVLVHRKTTGAQLVYSGQPVSNETSNILPEKKRQSFDLSTLNKTIIKFDTAKKQKLNVDQYKIVEKIFKYPKQELPKQIKAEEILPFLNHKFQEPVKYWKNGKEESFNLTLLIVEAVQAQDKRKLQPYYDWKTWYIQTKSDLLKKSIENNRIDLTENLSKRKKALLAWETEFTASGSIDLTHYHKVYMTDVLCKMLQDVKPLTDDKGKINTNAYHRGLKKALQNHQPAIFGTREVPNEANRADNQLSIYHLEVVKYLEHYFPIKTSKRRNTADDIAHYLKAQTLKTTIEKQLVNAIRANIIQQGKTNHHELKADTTSNDLIRIKTNEAFVLNLTGTCAFAANNIRNMVDNEQTNDILGKGDFIKSLLKDNTNSQLYSFFFGEGLSTNKAEKETQLWGIRGAVQQIRNNVNHYKKDALKTVFNISNFENPTITDPKQQTNYADTIYKARFINELEKIPEAFAQQLKTGGAVSYYTIENLKSLLTTFQFSLCRSTIPFAPGFKKVFNGGINYQNAKQDESFYELMLEQYLRKENFAEESYNARYFMLKLIYNNLFLPGFTTDRKAFADSVGFVQMQNKKQAEKVNPRKKEAYAFEAVRPMTAADSIADYMAYVQSELMQEQNKKEEKVAEETRINFEKFVLQVFIKGFDSFLRAKEFDFVQMPQPQLTATASNQQKADKLNQLEASITADCKLTPQYAKADDATHIAFYVFCKLLDAAHLSNLRNELIKFRESVNEFKFHHLLEIIEICLLSADVVPTDYRDLYSSEADCLARLRPFIEQGADITNWSDLFVQSDKHSPVIHANIELSVKYGTTKLLEQIINKDTQFKTTEANFTAWNTAQKSIEQLIKQREDHHEQWVKAKNADDKEKQERKREKSNFAQKFIEKHGDDYLDICDYINTYNWLDNKMHFVHLNRLHGLTIELLGRMAGFVALFDRDFQFFDEQQIADEFKLHGFVNLHSIDKKLNEVPTKKIKEIYDIRNKIIQINGNKINESVRANLIQFISSKRNYYNNAFLHVSNDEIKEKQMYDIRNHIAHFNYLTKDAADFSLIDLINELRELLHYDRKLKNAVSKAFIDLFDKHGMILKLKLNADHKLKVESLEPKKIYHLGSSAKDKPEYQYCTNQVMMAYCNMCRSLLEMKK

SEQ ID NO: 40 - protein, 970 aa, Listeria weihenstephanensis
MLALLHQEVPSQKLHNLKSLNTESLTKLFKPKFQNMISYPPSKGAEHVQFCLTDIAVPAIRDLDEIKPDWGIFFEKLKPYTDWAESYIHYKQTTIQKSIEQNKIQSPDSPRKLVLQKYVTAFLNGEPLGLDLVAKKYKLADLAESFKVVDLNEDKSANYKIKACLQQHQRNILDELKEDPELNQYGIEVKKYIQRYFPIKRAPNRSKHARADFLKKELIESTVEQQFKNAVYHYVLEQGKMEAYELTDPKTKDLQDIRSGEAFSFKFINACAFASNNLKMILNPECEKDILGKGDFKKNLPNSTTQSDVVKKMIPFFSDEIQNVNFDEAIWAIRGSIQQIRNEVYHCKKHSWKSILKIKGFEFEPNNMKYTDSDMQKLMDKDIAKIPDFIEEKLKSSGIIRFYSHDKLQSIWEMKQGFSLLTTNAPFVPSFKRVYAKGHDYQTSKNRYYDLGLTTFDILEYGEEDFRARYFLTKLVYYQQFMPWFTADNNAFRDAANFVLRLNKNRQQDAKAFINIREVEEGEMPRDYMGYVQGQIAIHEDSTEDTPNHFEKFISQVFIKGFDSHMRSADLKFIKNPRNQGLEQSEIEEMSFDIKVEPSFLKNKDDYIAFWTFCKMLDARHLSELRNEMIKYDGHLTGEQEIIGLALLGVDSRENDWKQFFSSEREYEKIMKGYVGEELYQREPYRQSDGKTPILFRGVEQARKYGTETVIQRLFDASPEFKVSKCNITEWERQKETIEETIERRKELHNEWEKNPKKPQNNAFFKEYKECCDAIDAYNWHKNKTTLVYVNELHHLLIEILGRYVGYVAIADRDFQCMANQYFKHSGITERVEYWGDNRLKSIKKLDTFLKKEGLFVSEKNARNHIAHLNYLSLKSECTLLYLSERLREIFKYDRKLKNAVSKSLIDILDRHGMSVVFANLKENKHRLVIKSLEPKKLRHLGEKKIDNGYIETNQVSEEYCGIVKRLLEI

SEQ ID NO: 41 - protein, 1051 aa, Listeriacea bacterium
MKITKMRVDGRTIVMERTSKEGQLGYEGIDGNKTTEIIFDKKKESFYKSILNKTVRKPDEKEKNRRKQAINKAINKEITELMLAVLHQEVPSQKLHNLKSLNTESLTKLFKPKFQNMISYPPSKGAEHVQFCLTDIAVPAIRDLDEIKPDWGIFFEKLKPYTDWAESYIHYKQTTIQKSIEQNKIQSPDSPRKLVLQKYVTAFLNGEPLGLDLVAKKYKLADLAESFKLVDLNEDKSANYKIKACLQQHQRNILDELKEDPELNQYGIEVKKYIQRYFPIKRAPNRSKHARADFLKKELIESTVEQQFKNAVYHYVLEQGKMEAYELTDPKTKDLQDIRSGEAFSFKFINACAFASNNLKMILNPECEKDILGKGNFKKNLPNSTTRSDVVKKMIPFFSDELQNVNFDEAIWAIRGSIQQIRNEVYHCKKHSWKSILKIKGFEFEPNNMKYADSDMQKLMDKDIAKIPEFIEEKLKSSGVVRFYRHDELQSIWEMKQGFSLLTTNAPFVPSFKRVYAKGHDYQTSKNRYYNLDLTTFDILEYGEEDFRARYFLTKLVYYQQFMPWFTADNNAFRDAANFVLRLNKNRQQDAKAFINIREVEEGEMPRDYMGYVQGQIAIHEDSIEDTPNHFEKFISQVFIKGFDRHMRSANLKFIKNPRNQGLEQSEIEEMSFDIKVEPSFLKNKDDYIAFWIFCKMLDARHLSELRNEMIKYDGHLTGEQEIIGLALLGVDSRENDWKQFFSSEREYEKIMKGYVVEELYQREPYRQSDGKTPILFRGVEQARKYGTETVIQRLFDANPEFKVSKCNLAEWERQKETIEETIKRRKELHNEWAKNPKKPQNNAFFKEYKECCDAIDAYNWHKNKTTLAYVNELHHLLIEILGRYVGYVAIADRDFQCMANQYFKHSGITERVEYWGDNRLKSIKKLDTFLKKEGLFVSEKNARNHIAHLNYLSLKSECTLLYLSERLREIFKYDRKLKNAVSKSLIDILDRHGMSVVFANLKENKHRLVIKSLEPKKLRHLGGKKIDGGYIETNQVSEEYCGIVKRLLEM

SEQ ID NO: 42 - protein, 1152 aa, Leptotrichia wadei
MKVTKVDGISHKKYIEEGKLVKSTSEENRTSERLSELLSIRLDIYIKNPDNASEEENRIRRENLKKFFSNKVLHLKDSVLYLKNRKEKNAVQDKNYSEEDISEYDLKNKNSFSVLKKILLNEDVNSEELEIFRKDVEAKLNKINSLKYSFEENKANYQKINENNVEKVGGKSKRNIIYDYYRESAKRNDYINNVQEAFDKLYKKEDIEKLFFLIENSKKHEKYKIREYYHKIIGRKNDKENFAKIIYEEIQNVNNIKELIEKIPDMSELKKSQVFYKYYLDKEELNDKNIKYAFCHFVEIEMSQLLKNYVYKRLSNISNDKIKRIFEYQNLKKLIENKLLNKLDTYVRNCGKYNYYLQVGEIATSDFIARNRQNEAFLRNIIGVSSVAYFSLRNILETENENDITGRMRGKTVKNNKGEEKYVSGEVDKIYNENKQNEVKENLKMFYSYDFNMDNKNEIEDFFANIDEAISSIRHGIVHFNLELEGKDIFAFKNIAPSEISKKMFQNEINEKKLKLKIFKQLNSANVFNYYEKDVIIKYLKNTKFNFVNKNIPFVPSFTKLYNKIEDLRNTLKFFWSVPKDKEEKDAQIYLLKNIYYGEFLNKFVKNSKVFFKITNEVIKINKQRNQKTGHYKYQKFENIEKTVPVEYLAIIQSREMINNQDKEEKNTYIDFIQQIFLKGFIDYLNKNNLKYIESNNNNDNNDIFSKIKIKKDNKEKYDKILKNYEKHNRNKEIPHEINEFVREIKLGKILKYTENLNMFYLILKLLNHKELTNLKGSLEKYQSANKEETFSDELELINLLNLDNNRVTEDFELEANEIGKFLDFNENKIKDRKELKKFDTNKIYFDGENIIKHRAFYNIKKYGMLNLLEKIADKAKYKISLKELKEYSNKKNEIEKNYTMQQNLHRKYARPKKDEKFNDEDYKEYEKAIGNIQKYTHLKNKVEFNELNLLQGLLLKILHRLVGYTSIWERDLRFRLKGEFPENHYIEEIFNFDNSKNVKYKSGQIVEKYINFYKELYKDNVEKRSIYSDKKVKKLKQEKKDLYIRNYIAHFNYIPHAEISLLEVLENLRKLLSYDRKLKNAIMKSIVDILKEYGFVATFKIGADKKIEIQTLESEKIVHLKNLKKKKLMTDRNSEELCELVKVMFEYKALE

SEQ ID NO: 43 - protein, 1285 aa, Rhodobacter capsulatus
MQIGKVQGRTISEFGDPAGGLKRKISTDGKNRKELPAHLSSDPKALIGQWISGIDKIYRKPDSRKSDGKAIHSPTPSKMQFDARDDLGEAFWKLVSEAGLAQDSDYDQFKRRLHPYGDKFQPADSGAKLKFEADPPEPQAFHGRWYGAMSKRGNDAKELAAALYEHLHVDEKRIDGQPKRNPKTDKFAPGLVVARALGIESSVLPRGMARLARNWGEEEIQTYFVVDVAASVKEVAKAAVSAAQAFDPPRQVSGRSLSPKVGFALAEHLERVTGSKRCSFDPAAGPSVLALHDEVKKTYKRLCARGKNAARAFPADKTELLALMRHTHENRVRNQMVRMGRVSEYRGQQAGDLAQSHYWTSAGQTEIKESEIFVRLWVGAFALAGRSMKAWIDPMGKIVNTEKNDRDLTAAVNIRQVISNKEMVAEAMARRGIYFGETPELDRLGAEGNEGFVFALLRYLRGCRNQTFHLGARAGFLKEIRKELEKTRWGKAKEAEHVVLTDKTVAAIRAIIDNDAKALGARLLADLSGAFVAHYASKEHFSTLYSEIVKAVKDAPEVSSGLPRLKLLLKRADGVRGYVHGLRDTRKHAFATKLPPPPAPRELDDPATKARYIALLRLYDGPFRAYASGITGTALAGPAARAKEAATALAQSVNVTKAYSDVMEGRTSRLRPPNDGETLREYLSALTGETATEFRVQIGYESDSENARKQAEFIENYRRDMLAFMFEDYIRAKGFDWILKIEPGATAMTRAPVLPEPIDTRGQYEHWQAALYLVMHFVPASDVSNLLHQLRKWEALQGKYELVQDGDATDQADARREALDLVKRFRDVLVLFLKTGEARFEGRAAPFDLKPFRALFANPATFDRLFMATPTTARPAEDDPEGDGASEPELRVARTLRGLRQIARYNHMAVLSDLFAKHKVRDEEVARLAEIEDETQEKSQIVAAQELRTDLHDKVMKCHPKTISPEERQSYAAAIKTIEEHRFLVGRVYLGDHLRLHRLMMDVIGRLIDYAGAYERDTGTFLINASKQLGAGADWAVTIAGAANTDARTQTRKDLAHFNVLDRADGTPDLTALVNRAREMMAYDRKRKNAVPRSILDMLARLGLTLKWQMKDHLLQDATITQAAIKHLDKVRLTVGGPAAVTEARFSQDYLQMVAAVFNGSVQNPKPRRRDDGDAWHKPPKPATAQSQPDQKPPNKAPSAGSRLPPPQVGEVYEGVVVKVIDTGSLGFLAVEGVAGNIGLHISRLRRIREDAIIVGRRYRFRVEIYVPPKSNTSKLNAADLVRID

SEQ ID NO: 44 - protein, 1285 aa, Rhodobacter capsulatus
MQIGKVQGRTISEFGDPAGGLKRKISTDGKNRKELPAHLSSDPKALIGQWISGIDKIYRKPDSRKSDGKAIHSPTPSKMQFDARDDLGEAFWKLVSEAGLAQDSDYDQFKRRLHPYGDKFQPADSGAKLKFEADPPEPQAFHGRWYGAMSKRGNDAKELAAALYEHLHVDEKRIDGQPKRNPKTDKFAPGLVVARALGIESSVLPRGMARLARNWGEEEIQTYFVVDVAASVKEVAKAAVSAAQAFDPPRQVSGRSLSPKVGFALAEHLERVTGSKRCSFDPAAGPSVLALHDEVKKTYKRLCARGKNAARAFPADKTELLALMRHTHENRVRNQMVRMGRVSEYRGQQAGDLAQSHYWTSAGQTEIKESEIFVRLWVGAFALAGRSMKAWIDPMGKIVNTEKNDRDLTAAVNIRQVISNKEMVAEAMARRGIYFGETPELDRLGAEGNEGFVFALLRYLRGCRNQTFHLGARAGFLKEIRKELEKTRWGKAKEAEHVVLTDKTVAAIRAIIDNDAKALGARLLADLSGAFVAHYASKEHFSTLYSEIVKAVKDAPEVSSGLPRLKLLLKRADGVRGYVHGLRDTRKHAFATKLPPPPAPRELDDPATKARYIALLRLYDGPFRAYASGITGTALAGPAARAKEAATALAQSVNVTKAYSDVMEGRSSRLRPPNDGETLREYLSALTGETATEFRVQIGYESDSENARKQAEFIENYRRDMLAFMFEDYIRAKGFDWILKIEPGATAMTRAPVLPEPIDTRGQYEHWQAALYLVMHFVPASDVSNLLHQLRKWEALQGKYELVQDGDATDQADARREALDLVKRFRDVLVLFLKTGEARFEGRAAPFDLKPFRALFANPATFDRLFMATPTTARPAEDDPEGDGASEPELRVARTLRGLRQIARYNHMAVLSDLFAKHKVRDEEVARLAEIEDETQEKSQIVAAQELRTDLHDKVMKCHPKTISPEERQSYAAAIKTIEEHRFLVGRVYLGDHLRLHRLMMDVIGRLIDYAGAYERDTGTFLINASKQLGAGADWAVTIAGAANTDARTQTRKDLAHFNVLDRADGTPDLTALVNRAREMMAYDRKRKNAVPRSILDMLARLGLTLKWQMKDHLLQDATITQAAIKHLDKVRLTVGGPAAVTEARFSQDYLQMVAAVFNGSVQNPKPRRRDDGDAWHKPPKPATAQSQPDQKPPNKAPSAGSRLPPPQVGEVYEGVVVKVIDTGSLGFLAVEGVAGNIGLHISRLRRIREDAIIVGRRYRFRVEIYVPPKSNTSKLNAADLVRID

SEQ ID NO: 45 - protein, 1285 aa, Rhodobacter capsulatus; identical to SEQ ID NO: 44

SEQ ID NO: 46 - protein, 1389 aa, Artificial Sequence
  Synthetic
MGNLFGHKRWYEVRDKKDFKIKRKVKVKRNYDGNKYILNINENNNKEKIDNNKFIRKYINYKKNDNILKEFTRKFHAGNILFKLKGKEGIIRIENNDDFLETEEVVLYIEAYGKSEKLKALGITKKKIIDEAIRQGITKDDKKIEIKRQENEEEIEIDIRDEYTNKTLNDCSIILRIIENDELETKKSIYEIFKNINMSLYKIIEKIIENETEKVFENRYYEEHLREKLLKDDKIDVILTNFMEIREKIKSNLEILGFVKFYLNVGGDKKKSKNKKMLVEKILNINVDLTVEDIADFVIKELEFWNITKRIEKVKKVNNEFLEKRRNRTYIKSYVLLDKHEKFKIERENKKDKIVKFFVENIKNNSIKEKIEKILAEFKIDELIKKLEKELKKGNCDTEIFGIFKKHYKVNFDSKKFSKKSDEEKELYKIIYRYLKGRIEKILVNEQKVRLKKMEKIEIEKILNESILSEKILKRVKQYTLEHIMYLGKLRHNDIDMTTVNTDDFSRLHAKEELDLELITFFASTNMELNKIFSRENINNDENIDFFGGDREKNYVLDKKILNSKIKIIRDLDFIDNKNNITNNFIRKFTKIGTNERNRILHAISKERDLQGTQDDYNKVINIIQNLKISDEEVSKALNLDVVFKDKKNIITKINDIKISEENNNDIKYLPSFSKVLPEILNLYRNNPKNEPFDTIETEKIVLNALIYVNKELYKKLILEDDLEENESKNIFLQELKKTLGNIDEIDENIIENYYKNAQISASKGNNKAIKKYQKKVIECYIGYLRKNYEELFDFSDFKMNIQEIKKQIKDINDNKTYERITVKTSDKTIVINDDFEYIISIFALLNSNAVINKIRNRFFATSVWLNTSEYQNIIDILDEIMQLNTLRNECITENWNLNLEEFIQKMKEIEKDFDDFKIQTKKEIFNNYYEDIKNNILTEFKDDINGCDVLEKKLEKIVIFDDETKFEIDKKSNILQDEQRKLSNINKKDLKKKVDQYIKDKDQEIKSKILCRIIFNSDFLKKYKKEIDNLIEDMESENENKFQEIYYPKERKNELYIYKKNLFLNIGNPNFDKIYGLISNDIKMADAKFLFNIDGKNIRKNKISEIDAILKNLNDKLNGYSKEYKEKYIKKLKENDDFFAKNIQNKNYKSFEKDYNRVSEYKKIRDLVEFNYLNKIESYLIDINWKLAIQMARFERDMHYIVNGLRELGIIKLSGYNTGISRAYPKRNGSDGFYTTTAYYKFFDEESYKKFEKICYGFGIDLSENSEINKPENESIRNYISHFYIVRNPFADYSIAEQIDRVSNLLSYSTRYNNSTYASVFEVFKKDVNLDYDELKKKFKLIGNNDILERLMKPKKVSVLELESYNSDYIKNLIIELLTKIENTNDTL

SEQ ID NO: 47 - protein, 1197 aa, L. wadei
MKVTKVDGISHKKYIEEGKLVKSTSEENRTSERLSELLSIRLDIYIKNPDNASEEENRIRRENLKKFFSNKVLHLKDSVLYLKNRKEKNAVQDKNYSEEDISEYDLKNKNSFSVLKKILLNEDVNSEELEIFRKDVEAKLNKINSLKYSFEENKANYQKINENNVEKVGGKSKRNIIYDYYRESAKRNDYINNVQEAFDKLYKKEDIEKLFFLIENSKKHEKYKIREYYHKIIGRKNDKENFAKIIYEEIQNVNNIKELIEKIPDMSELKKSQVFYKYYLDKEELNDKNIKYAFCHFVEIEMSQLLKNYVYKRLSNISNDKIKRIFEYQNLKKLIENKLLNKLDTYVRNCGKYNYYLQVGEIATSDFIARNRQNEAFLRNIIGVSSVAYFSLRNILETENENDITGRMRGKTVKNNKGEEKYVSGEVDKIYNENKQNEVKENLKMFYSYDFNMDNKNEIEDFFANIDEAISSIRHGIVHFNLELEGKDIFAFKNIAPSEISKKMFQNEINEKKLKLKIFKQLNSANVFNYYEKDVIIKYLKNTKFNFVNKNIPFVPSFTKLYNKIEDLRNTLKFFWSVPKDKEEKDAQIYLLKNIYYGEFLNKFVKNSKVFFKITNEVIKINKQRNQKTGHYKYQKFENIEKTVPVEYLAIIQSREMINNQDKEEKNTYIDFIQQIFLKGFIDYLNKNNLKYIESNNNNDNNDIFSKIKIKKDNKEKYDKILKNYEKHNRNKEIPHEINEFVREIKLGKILKYTENLNMFYLILKLLNHKELTNLKGSLEKYQSANKEETFSDELELINLLNLDNNRVTEDFELEANEIGKFLDFNENKIKDRKELKKFDTNKIYFDGENIIKHRAFYNIKKYGMLNLLEKIADKAKYKISLKELKEYSNKKNEIEKNYTMQQNLHRKYARPKKDEKFNDEDYKEYEKAIGNIQKYTHLKNKVEFNELNLLQGLLLKILHRLVGYTSIWERDLRFRLKGEFPENHYIEEIFNFDNSKNVKYKSGQIVEKYINFYKELYKDNVEKRSIYSDKKVKKLKQEKKDLYIRNYIAHFNYIPHAEISLLEVLENLRKLLSYDRKLKNAIMKSIVDILKEYGFVATFKIGADKKIEIQTLESEKIVHLKNLKKKKLMTDRNSEELCELVKVMFEYKALEKRPAATKKAGQAKKKKGSYPYDVPDYAYPYDVPDYAYPYDVPDYA

SEQ ID NO: 48 - protein, 1120 aa, Listeria seeligeri
MWISIKTLIHHLGVLFFCDYMYNRREKKIIEVKTMRITKVEVDRKKVLISRDKNGGKLVYENEMQDNTEQIMHHKKSSFYKSVVNKTICRPEQKQMKKLVHGLLQENSQEKIKVSDVTKLNISNFLNHRFKKSLYYFPENSPDKSEEYRIEINLSQLLEDSLKKQQGTFICWESFSKDMELYINWAENYISSKTKLIKKSIRNNRIQSTESRSGQLMDRYMKDILNKNKPFDIQSVSEKYQLEKLTSALKATFKEAKKNDKEINYKLKSTLQNHERQIIEELKENSELNQFNIEIRKHLETYFPIKKTNRKVGDIRNLEIGEIQKIVNHRLKNKIVQRILQEGKLASYEIESTVNSNSLQKIKIEEAFALKFINACLFASNNLRNMVYPVCKKDILMIGEFKNSFKEIKHKKFIRQWSQFFSQEITVDDIELASWGLRGAIAPIRNEIIHLKKHSWKKFFNNPTFKVKKSKIINGKTKDVTSEFLYKETLFKDYFYSELDSVPELIINKMESSKILDYYSSDQLNQVFTIPNFELSLLTSAVPFAPSFKRVYLKGFDYQNQDEAQPDYNLKLNIYNEKAFNSEAFQAQYSLFKMVYYQVFLPQFTTNNDLFKSSVDFILTLNKERKGYAKAFQDIRKMNKDEKPSEYMSYIQSQLMLYQKKQEEKEKINHFEKFINQVFIKGFNSFIEKNRLTYICHPTKNTVPENDNIEIPFHTDMDDSNIAFWLMCKLLDAKQLSELRNEMIKFSCSLQSTEEISTFTKAREVIGLALLNGEKGCNDWKELFDDKEAWKKNMSLYVSEELLQSLPYTQEDGQTPVINRSIDLVKKYGTETILEKLFSSSDDYKVSAKDIAKLHEYDVTEKIAQQESLHKQWIEKPGLARDSAWTKKYQNVINDISNYQWAKTKVELTQVRHLHQLTIDLLSRLAGYMSIADRDFQFSSNYILERENSEYRVTSWILLSENKNKNKYNDYELYNLKNASIKVSSKNDPQLKVDLKQLRLTLEYLELFDNRLKEKRNNISHFNYLNGQLGNSILELFDDARDVLSYDRKLKNAVSKSLKEILSSHGMEVTFKPLYQTNHHLKIDKLQPKKIHHLGEKSTVSSNQVSNEYCQLVRTLLTMK

SEQ ID NO: 49 - protein, 1159 aa, Leptotrichia buccalis
MKVTKVGGISHKKYTSEGRLVKSESEENRTDERLSALLNMRLDMYIKNPSSTETKENQKRIGKLKKFFSNKMVYLKDNTLSLKNGKKENIDREYSETDILESDVRDKKNFAVLKKIYLNENVNSEELEVFRNDIKKKLNKINSLKYSFEKNKANYQKINENNIEKVEGKSKRNIIYDYYRESAKRDAYVSNVKEAFDKLYKEEDIAKLVLEIENLTKLEKYKIREFYHEIIGRKNDKENFAKIIYEEIQNVNNMKELIEKVPDMSELKKSQVFYKYYLDKEELNDKNIKYAFCHFVEIEMSQLLKNYVYKRLSNISNDKIKRIFEYQNLKKLIENKLLNKLDTYVRNCGKYNYYLQDGEIATSDFIARNRQNEAFLRNIIGVSSVAYFSLRNILETENENDITGRMRGKTVKNNKGEEKYVSGEVDKIYNENKKNEVKENLKMFYSYDFNMDNKNEIEDFFANIDEAISSIRHGIVHFNLELEGKDIFAFKNIAPSEISKKMFQNEINEKKLKLKIFRQLNSANVFRYLEKYKILNYLKRTRFEFVNKNIPFVPSFTKLYSRIDDLKNSLGIYWKTPKTNDDNKTKEIIDAQIYLLKNIYYGEFLNYFMSNNGNFFEISKEIIELNKNDKRNLKTGFYKLQKFEDIQEKIPKEYLANIQSLYMINAGNQDEEEKDTYIDFIQKIFLKGFMTYLANNGRLSLIYIGSDEETNTSLAEKKQEFDKFLKKYEQNNNIKIPYEINEFLREIKLGNILKYTERLNMFYLILKLLNHKELTNLKGSLEKYQSANKEEAFSDQLELINLLNLDNNRVTEDFELEADEIGKFLDFNGNKVKDNKELKKFDTNKIYFDGENIIKHRAFYNIKKYGMLNLLEKIADKAGYKISIEELKKYSNKKNEIEKNHKMQENLHRKYARPRKDEKFTDEDYESYKQAIENIEEYTHLKNKVEFNELNLLQGLLLRILHRLVGYTSIWERDLRFRLKGEFPENQYIEEIFNFENKKNVKYKGGQIVEKYIKFYKELHQNDEVKINKYSSANIKVLKQEKKDLYIRNYIAHFNYIPHAEISLLEVLENLRKLLSYDRKLKNAVMKSVVDILKEYGFVATFKIGADKKIGIQTLESEKIVHLKNLKKKKLMTDRNSEELCKLVKIMFEYKMEEKKSEN

SEQ ID NO: 50 - protein, 1285 aa, Herbinix hemicellulosilytica
MKLTRRRISGNSVDQKITAAFYRDMSQGLLYYDSEDNDCTDKVIESMDFERSWRGRILKNGEDDKNPFYMFVKGLVGSNDKIVCEPIDVDSDPDNLDILINKNLTGFGRNLKAPDSNDTLENLIRKIQAGIPEEEVLPELKKIKEMIQKDIVNRKEQLLKSIKNNRIPFSLEGSKLVPSTKKMKWLFKLIDVPNKTFNEKMLEKYWEIYDYDKLKANITNRLDKTDKKARSISRAVSEELREYHKNLRTNYNRFVSGDRPAAGLDNGGSAKYNPDKEEFLLFLKEVEQYFKKYFPVKSKHSNKSKDKSLVDKYKNYCSYKVVKKEVNRSIINQLVAGLIQQGKLLYYFYYNDTWQEDFLNSYGLSYIQVEEAFKKSVMTSLSWGINRLTSFFIDDSNTVKFDDITTKKAKEAIESNYFNKLRTCSRMQDHFKEKLAFFYPVYVKDKKDRPDDDIENLIVLVKNAIESVSYLRNRTFHFKESSLLELLKELDDKNSGQNKIDYSVAAEFIKRDIENLYDVFREQIRSLGIAEYYKADMISDCFKTCGLEFALYSPKNSLMPAFKNVYKRGANLNKAYIRDKGPKETGDQGQNSYKALEEYRELTWYIEVKNNDQSYNAYKNLLQLIYYHAFLPEVRENEALITDFINRTKEWNRKETEERLNTKNNKKHKNFDENDDITVNTYRYESIPDYQGESLDDYLKVLQRKQMARAKEVNEKEEGNNNYIQFIRDVVVWAFGAYLENKLKNYKNELQPPLSKENIGLNDTLKELFPEEKVKSPFNIKCRFSISTFIDNKGKSTDNTSAEAVKTDGKEDEKDKKNIKRKDLLCFYLFLRLLDENEICKLQHQFIKYRCSLKERRFPGNRTKLEKETELLAELEELMELVRFTMPSIPEISAKAESGYDTMIKKYFKDFIEKKVFKNPKTSNLYYHSDSKTPVTRKYMALLMRSAPLHLYKDIFKGYYLITKKECLEYIKLSNIIKDYQNSLNELHEQLERIKLKSEKQNGKDSLYLDKKDFYKVKEYVENLEQVARYKHLQHKINFESLYRIFRIHVDIAARMVGYTQDWERDMHFLFKALVYNGVLEERRFEAIFNNNDDNNDGRIVKKIQNNLNNKNRELVSMLCWNKKLNKNEFGAIIWKRNPIAHLNHFTQTEQNSKSSLESLINSLRILLAYDRKRQNAVTKTINDLLLNDYHIRIKWEGRVDEGQIYFNIKEKEDIENEPIIHLKHLHKKDCYIYKNSYMFDKQKEWICNGIKEEVYDKSILKCIGNLFKFDYEDKNKSSANPKHT

SEQ ID NO: 51 - protein, 1344 aa, Eubacterium rectale
MLRRDKEVKKLYNVFNQIQVGTKPKKWNNDEKLSPEENERRAQQKNIKMKNYKWREACSKYVESSQRIINDVIFYSYRKAKNKLRYMRKNEDILKKMQEAEKLSKFSGGKLEDFVAYTLRKSLVVSKYDTQEFDSLAAMVVFLECIGKNNISDHEREIVCKLLELIRKDFSKLDPNVKGSQGANIVRSVRNQNMIVQPQGDRFLFPQVYAKENETVTNKNVEKEGLNEFLLNYANLDDEKRAESLRKLRRILDVYFSAPNHYEKDMDITLSDNIEKEKFNVWEKHECGKKETGLFVDIPDVLMEAEAENIKLDAVVEKRERKVLNDRVRKQNIICYRYTRAVVEKYNSNEPLFFENNAINQYWIHHIENAVERILKNCKAGKLFKLRKGYLAEKVWKDAINLISIKYIALGKAVYNFALDDIWKDKKNKELGIVDERIRNGITSFDYEMIKAHENLQRELAVDIAFSVNNLARAVCDMSNLGNKESDFLLWKRNDIADKLKNKDDMASVSAVLQFFGGKSSWDINIFKDAYKGKKKYNYEVRFIDDLRKAIYCARNENFHFKTALVNDEKWNTELFGKIFERETEFCLNVEKDRFYSNNLYMFYQVSELRNMLDHLYSRSVSRAAQVPSYNSVIVRTAFPEYITNVLGYQKPSYDADTLGKWYSACYYLLKEIYYNSFLQSDRALQLFEKSVKTLSWDDKKQQRAVDNFKDHFSDIKSACTSLAQVCQIYMTEYNQQNNQIKKVRSSNDSIFDQPVYQHYKVLLKKAIANAFADYLKNNKDLFGFIGKPFKANEIREIDKEQFLPDWTSRKYEALCIEVSGSQELQKWYIVGKFLNARSLNLMVGSMRSYIQYVTDIKRRAASIGNELHVSVHDVEKVEKWVQVIEVCSLLASRTSNQFEDYFNDKDDYARYLKSYVDFSNVDMPSEYSALVDFSNEEQSDLYVDPKNPKVNRNIVHSKLFAADHILRDIVEPVSKDNIEEFYSQKAEIAYCKIKGKEITAEEQKAVLKYQKLKNRVELRDIVEYGEIINELLGQLINWSFMRERDLLYFQLGFHYDCLRNDSKKPEGYKNIKVDENSIKDAILYQIIGMYVNGVTVYAPEKDGDKLKEQCVKGGVGVKVSAFHRYSKYLGLNEKTLYNAGLEIFEVVAEHEDIINLRNGIDHFKYYLGDYRSMLSIYSEVFDRFFTYDIKYQKNVLNLLQNILLRHNVIVEPILESGFKTIGEQTKPGAKLSIRSIKSDTFQYKVKGGTLITDAKDERYLETIRKILYYAENEEDNLKKSVVVTNADKYEKNKESDDQNKQKEKKNKDNKGKKNEETKSDAEKNNNERLSYNPFANLNFKLSN

SEQ ID NO: 52 - protein, 1373 aa, Eubacteriacea bacterium
MKISKESHKRTAVAVMEDRVGGVVYVPGGSGIDLSNNLKKRSMDTKSLYNVFNQIQAGTAPSEYEWKDYLSEAENKKREAQKMIQKANYELRRECEDYAKKANLAVSRIIFSKKPKKIFSDDDIISHMKKQRLSKFKGRMEDFVLIALRKSLVVSTYNQEVFDSRKAATVFLKNIGKKNISADDERQIKQLMALIREDYDKWNPDKDSSDKKESSGTKVIRSIEHQNMVIQPEKNKLSLSKISNVGKKTKTKQKEKAGLDAFLKEYAQIDENSRMEYLKKLRRLLDTYFAAPSSYIKGAAVSLPENINFSSELNVWERHEAAKKVNINFVEIPESLLNAEQNNNKINKVEQEHSLEQLRTDIRRRNITCYHFANALAADERYHTLFFENMAMNQFWIHHMENAVERILKKCNVGTLFKLRIGYLSEKVWKDMLNLLSIKYIALGKAVYHFALDDIWKADIWKDASDKNSGKINDLTLKGISSFDYEMVKAQEDLQREMAVGVAFSTNNLARVTCKMDDLSDAESDFLLWNKEAIRRHVKYTEKGEILSAILQFFGGRSLWDESLFEKAYSDSNYELKFLDDLKRAIYAARNETFHFKTAAIDGGSWNTRLFGSLFEKEAGLCLNVEKNKFYSNNLVLFYKQEDLRVFLDKLYGKECSRAAQIPSYNTILPRKSFSDFMKQLLGLKEPVYGSAILDQWYSACYYLFKEVYYNLFLQDSSAKALFEKAVKALKGADKKQEKAVESFRKRYWEISKNASLAEICQSYITEYNQQNNKERKVRSANDGMFNEPIYQHYKMLLKEALKMAFASYIKNDKELKFVYKPTEKLFEVSQDNFLPNWNSEKYNTLISEVKNSPDLQKWYIVGKFMNARMLNLLLGSMRSYLQYVSDIQKRAAGLGENQLHLSAENVGQVKKWIQVLEVCLLLSVRISDKFTDYFKDEEEYASYLKEYVDFEDSAMPSDYSALLAFSNEGKIDLYVDASNPKVNRNIIQAKLYAPDMVLKKVVKKISQDECKEFNEKKEQIMQFKNKGDEVSWEEQQKILEYQKLKNRVELRDLSEYGELINELLGQLINWSYLRERDLLYFQLGFHYSCLMNESKKPDAYKTIRRGTVSIENAVLYQIIAMYINGFPVYAPEKGELKPQCKTGSAGQKIRAFCQWASMVEKKKYELYNAGLELFEVVKEHDNIIDLRNKIDHFKYYQGNDSILALYGEIFDRFFTYDMKYRNNVLNHLQNILLRHNVIIKPIISKDKKEVGRGKMKDRAAFLLEEVSSDRFTYKVKEGERKIDAKNRLYLETVRDILYFPNRAVNDKGEDVIICSKKAQDLNEKKADRDKNHDKSKDTNQKKEGKNQEEKSENKEPYSDRMTWKPFAGIKLE

SEQ ID NO: 53 - protein, 1276 aa, Blautia sp.
MKISKVDHVKSGIDQKLSSQRGMLYKQPQKKYEGKQLEEHVRNLSRKAKALYQVFPVSGNSKMEKELQIINSFIKNILLRLDSGKTSEEIVGYINTYSVASQISGDHIQELVDQHLKESLRKYTCVGDKRIYVPDIIVALLKSKFNSETLQYDNSELKILIDFIREDYLKEKQIKQIVHSIENNSTPLRIAEINGQKRLIPANVDNPKKSYIFEFLKEYAQSDPKGQESLLQHMRYLILLYLYGPDKITDDYCEEIEAWNFGSIVMDNEQLFSEEASMLIQDRIYVNQQIEEGRQSKDTAKVKKNKSKYRMLGDKIEHSINESVVKHYQEACKAVEEKDIPWIKYISDHVMSVYSSKNRVDLDKLSLPYLAKNTWNTWISFIAMKYVDMGKGVYHFAMSDVDKVGKQDNLIIGQIDPKFSDGISSFDYERIKAEDDLHRSMSGYIAFAVNNFARAICSDEFRKKNRKEDVLTVGLDEIPLYDNVKRKLLQYFGGASNWDDSIIDIIDDKDLVACIKENLYVARNVNFHFAGSEKVQKKQDDILEEIVRKETRDIGKHYRKVFYSNNVAVFYCDEDIIKLMNHLYQREKPYQAQIPSYNKVISKTYLPDLIFMLLKGKNRTKISDPSIMNMFRGTFYFLLKEIYYNDFLQASNLKEMFCEGLKNNVKNKKSEKPYQNFMRRFEELENMGMDFGEICQQIMTDYEQQNKQKKKTATAVMSEKDKKIRTLDNDTQKYKHFRTLLYIGLREAFIIYLKDEKNKEWYEFLREPVKREQPEEKEFVNKWKLNQYSDCSELILKDSLAAAWYVVAHFINQAQLNHLIGDIKNYIQFISDIDRRAKSTGNPVSESTEIQIERYRKILRVLEFAKFFCGQITNVLTDYYQDENDFSTHVGHYVKFEKKNMEPAHALQAFSNSLYACGKEKKKAGFYYDGMNPIVNRNITLASMYGNKKLLENAMNPVTEQDIRKYYSLMAELDSVLKNGAVCKSEDEQKNLRHFQNLKNRIELVDVLTLSELVNDLVAQLIGWVYIRERDMMYLQLGLHYIKLYFTDSVAEDSYLRTLDLEEGSIADGAVLYQIASLYSFNLPMYVKPNKSSVYCKKHVNSVATKFDIFEKEYCNGDETVIENGLRLFENINLHKDMVKFRDYLAHFKYFAKLDESILELYSKAYDFFFSYNIKLKKSVSYVLTNVLLSYFINAKLSFSTYKSSGNKTVQHRTTKISVVAQTDYFTYKLRSIVKNKNGVESIENDDRRCEVVNIAARDKEFVDEVCNVINYNSDK

SEQ ID NO: 54 - protein, 1385 aa, Leptotrichia sp.
MGNLFGHKRWYEVRDKKDFKIKRKVKVKRNYDGNKYILNINENNNKEKIDNNKFIGEFVNYKKNNNVLKEFKRKFHAGNILFKLKGKEEIIRIENNDDFLETEEVVLYIEVYGKSEKLKALEITKKKIIDEAIRQGITKDDKKIEIKRQENEEEIEIDIRDEYTNKTLNDCSIILRIIENDELETKKSIYEIFKNINMSLYKIIEKIIENETEKVFENRYYEEHLREKLLKDNKIDVILTNFMEIREKIKSNLEIMGFVKFYLNVSGDKKKSENKKMFVEKILNTNVDLTVEDIVDFIVKELKFWNITKRIEKVKKFNNEFLENRRNRTYIKSYVLLDKHEKFKIERENKKDKIVKFFVENIKNNSIKEKIEKILAEFKINELIKKLEKELKKGNCDTEIFGIFKKHYKVNFDSKKFSNKSDEEKELYKIIYRYLKGRIEKILVNEQKVRLKKMEKIEIEKILNESILSEKILKRVKQYTLEHIMYLGKLRHNDIVKMTVNTDDFSRLHAKEELDLELITFFASTNMELNKIFNGKEKVTDFFGFNLNGQKITLKEKVPSFKLNILKKLNFINNENNIDEKLSHFYSFQKEGYLLRNKILHNSYGNIQETKNLKGEYENVEKLIKELKVSDEEISKSLSLDVIFEGKVDIINKINSLKIGEYKDKKYLPSFSKIVLEITRKFREINKDKLFDIESEKIILNAVKYVNKILYEKITSNEENEFLKTLPDKLVKKSNNKKENKNLLSIEEYYKNAQVSSSKGDKKAIKKYQNKVTNAYLEYLENTFTEIIDFSKFNLNYDEIKTKIEERKDNKSKIIIDSISTNINITNDIEYIISIFALLNSNTYINKIRNRFFATSVWLEKQNGTKEYDYENIISILDEVLLINLLRENNITDILDLKNAIIDAKIVENDETYIKNYIFESNEEKLKKRLFCEELVDKEDIRKIFEDENFKFKSFIKKNEIGNFKINFGILSNLECNSEVEAKKIIGKNSKKLESFIQNIIDEYKSNIRTLFSSEFLEKYKEEIDNLVEDTESENKNKFEKIYYPKEHKNELYIYKKNLFLNIGNPNFDKIYGLISKDIKNVDTKILFDDDIKKNKISEIDAILKNLNDKLNGYSNDYKAKYVNKLKENDDFFAKNIQNENYSSFGEFEKDYNKVSEYKKIRDLVEFNYLNKIESYLIDINWKLAIQMARFERDMHYIVNGLRELGIIKLSGYNTGISRAYPKRNGSDGFYTTTAYYKFFDEESYKKFEKICYGFGIDLSENSEINKPENESIRNYISHFYIVRNPFADYSIAEQIDRVSNLLSYSTRYNNSTYASVFEVFKKDVNLDYDELKKKFRLIGNNDILERLMKPKKVSVLELESYNSDYIKNLIIELLTKIENTNDTL

SEQ ID NO: 55 - protein, 1334 aa, Lachnospiraceae bacteroi,
MKISKVDHTRMAVAKGNQHRRDEISGILYKDPTKTGSIDFDERFKKLNCSAKILYHVFNGIAEGSNKYKNIVDKVNNNLDRVLFTGKSYDRKSIIDIDTVLRNVEKINAFDRISTEEREQIIDDLLEIQLRKGLRKGKAGLREVLLIGAGVIVRTDKKQEIADFLEILDEDFNKTNQAKNIKLSIENQGLVVSPVSRGEERIFDVSGAQKGKSSKKAQEKEALSAFLLDYADLDKNVRFEYLRKIRRLINLYFYVKNDDVMSLTEIPAEVNLEKDFDIWRDHEQRKEENGDFVGCPDILLADRDVKKSNSKQVKIAERQLRESIREKNIKRYRFSIKTIEKDDGTYFFANKQISVFWIHRIENAVERILGSINDKKLYRLRLGYLGEKVWKDILNFLSIKYIAVGKAVFNFAMDDLQEKDRDIEPGKISENAVNGLTSFDYEQIKADEMLQREVAVNVAFAANNLARVTVDIPQNGEKEDILLWNKSDIKKYKKNSKKGILKSILQFFGGASTWNMKMFEIAYHDQPGDYEENYLYDIIQIIYSLRNKSFHFKTYDHGDKNWNRELIGKMIEHDAERVISVEREKFHSNNLPMFYKDADLKKILDLLYSDYAGRASQVPAFNTVLVRKNFPEFLRKDMGYKVHFNNPEVENQWHSAVYYLYKEIYYNLFLRDKEVKNLFYTSLKNIRSEVSDKKQKLASDDFASRCEEIEDRSLPEICQIIMTEYNAQNFGNRKVKSQRVIEKNKDIFRHYKMLLIKTLAGAFSLYLKQERFAFIGKATPIPYETTDVKNFLPEWKSGMYASFVEEIKNNLDLQEWYIVGRFLNGRMLNQLAGSLRSYIQYAEDIERRAAENRNKLFSKPDEKIEACKKAVRVLDLCIKISTRISAEFTDYFDSEDDYADYLEKYLKYQDDAIKELSGSSYAALDHFCNKDDLKFDIYVNAGQKPILQRNIVMAKLFGPDNILSEVMEKVTESAIREYYDYLKKVSGYRVRGKCSTEKEQEDLLKFQRLKNAVEFRDVTEYAEVINELLGQLISWSYLRERDLLYFQLGFHYMCLKNKSFKPAEYVDIRRNNGTIIHNAILYQIVSMYINGLDFYSCDKEGKTLKPIETGKGVGSKIGQFIKYSQYLYNDPSYKLEIYNAGLEVFENIDEHDNITDLRKYVDHFKYYAYGNKMSLLDLYSEFFDRFFTYDMKYQKNVVNVLENILLRHFVIFYPKFGSGKKDVGIRDCKKERAQIEISEQSLTSEDFMFKLDDKAGEEAKKFPARDERYLQTIAKLLYYPNEIEDMNRFMKKGETINKKVQFNRKKKITRKQKNNSSNEVLSSTMGYLFKNIKL

SEQ ID NO: 56 - protein, 500 aa, Chloroflexus aggregans
MTDQVRREEVAAGELADTPLAAAQTPAADAAVAATPAPAEAVAPTPEQAVDQPATTGESEAPVTTAQAAAHEAEPAEATGASFTPVSEQQPQKPRRLKDLQPGMELEGKVTSIALYGIFVDVGVGRDGLVHISEMSDRRIDTPSELVQIGDTVKVWVKSVDLDARRISLTMLNPSRGEKPRRSRQSQPAQPQPRRQEVDREKLASLKVGEIVEGVITGFAPFGAFADIGVGKDGLIHISELSEGRVEKPEDAVKVGERYQFKVLEIDGEGTRISLSLRRAQRTQRMQQLEPGQIIEGTVSGIATFGAFVDIGVGRDGLVHISALAPHRVAKVEDVVKVGDKVKVKVLGVDPQSKRISLTMRLEEEQPATTAGDEAAEPAEEVTPTRRGNLERFAAAAQTARERSERGERSERGERRERRERRPAQSSPDTYIVGEDDDESFEGNATIEDLLTKFGGSSSRRDRDRRRRHEDDDDEEMERPSNRRQREAIRRTLQQIGYDE

SEQ ID NO: 57 - protein, 249 aa, Demequina aurantiaca
MDLTWHALLILFIVALLAGFLDTLAGGGGLLTVPALLLTGIPPLQALGTNKLQSSFGTGMATYQVIRKKRVHWRDVRWPMVWAFLGSAAGAVAVQFIDTDALLIIIPVVLALVAAYFLFVPKSHLPPPEPRMSDPAYEATLVPIIGAYDGAFGPGTGSLYALSGVALRAKTLVQSTAIAKTLNFATNFAALLVFAFAGHMLWTVGAVMIAGQLIGAYAGSHMLFRVNPLVLRVLIVVMSLGMLIRVLLD

SEQ ID NO: 58 - protein, 1235 aa, Thalassospira sp.
MRIIKPYGRSHVEGVATQEPRRKLRLNSSPDISRDIPGFAQSHDALIIAQWISAIDKIATKPKPDKKPTQAQINLRTTLGDAAWQHVMAENLLPAATDPAIREKLHLIWQSKIAPWGTARPQAEKDGKPTPKGGWYERFCGVLSPEAITQNVARQIAKDIYDHLHVAAKRKGREPAKQGESSNKPGKFKPDRKRGLIEERAESIAKNALRPGSHAPCPWGPDDQATYEQAGDVAGQIYAAARDCLEEKKRRSGNRNTSSVQYLPRDLAAKILYAQYGRVFGPDTTIKAALDEQPSLFALHKAIKDCYHRLINDARKRDILRILPRNMAALFRLVRAQYDNRDINALIRLGKVIHYHASEQGKSEHHGIRDYWPSQQDIQNSRFWGSDGQADIKRHEAFSRIWRHIIALASRTLHDWADPHSQKFSGENDDILLLAKDAIEDDVFKAGHYERKCDVLFGAQASLFCGAEDFEKAILKQAITGTGNLRNATFHFKGKVRFEKELQELTKDVPVEVQSAIAALWQKDAEGRTRQIAETLQAVLAGHFLTEEQNRHIFAALTAAMAQPGDVPLPRLRRVLARHDSICQRGRILPLSPCPDRAKLEESPALTCQYTVLKMLYDGPFRAWLAQQNSTILNHYIDSTIARTDKAARDMNGRKLAQAEKDLITSRAADLPRLSVDEKMGDFLARLTAATATEMRVQRGYQSDGENAQKQAAFIGQFECDVIGRAFADFLNQSGFDFVLKLKADTPQPDAAQCDVTALIAPDDISVSPPQAWQQVLYFILHLVPVDDASHLLHQIRKWQVLEGKEKPAQIAHDVQSVLMLYLDMHDAKFTGGAALHGIEKFAEFFAHAADFRAVFPPQSLQDQDRSIPRRGLREIVRFGHLPLLQHMSGTVQITHDNVVAWQAARTAGATGMSPIARRQKQREELHALAVERTARFRNADLQNYMHALVDVIKHRQLSAQVTLSDQVRLHRLMMGVLGRLVDYAGLWERDLYFVVLALLYHHGATPDDVFKGQGKKNLADGQVVAALKPKNRKAAAPVGVFDDLDHYGIYQDDRQSIRNGLSHFNMLRGGKAPDLSHWVNQTRSLVAHDRKLKNAVAKSVIEMLAREGFDLDWGIQTDRGQHILSHGKIRTRQAQHFQKSRLHIVKKSAKPDKNDTVKIRENLHGDAMVERVVQLFAAQVQKRYDITVEKRLDHLFLKPQDQKGKNGIHTHNGWSKTEKKRRPSRENRKGNHEN

SEQ ID NO: 59 - protein, 1312 aa, Pseudobutyrivibrio sp.
MKFSKESHRKTAVGVTESNGIIGLLYKDPLNEKEKIEDVVNQRANSTKRLFNLFGTEATSKDISRASKDLAKVVNKAIGNLKGNKKFNKKEQITKGLNTKIIVEELKNVLKDEKKLIVNKDIIDEACSRLLKTSFRTAKTKQAVKMILTAVLIENTNLSKEDEAFVHEYFVKKLVNEYNKTSVKKQIPVALSNQNMVIQPNSVNGTLEISETKKSKETKTTEKDAFRAFLRDYATLDENRRHKMRLCLRNLVNLYFYGETSVSKDDFDEWRDHEDKKQNDELFVKKIVSIKTDRKGNVKEVLDVDATIDAIRTNNIACYRRALAYANENPDVFFSDTMLNKFWIHHVENEVERIYGHINNNTGDYKYQLGYLSEKVWKGIINYLSIKYIAEGKAVYNYAMNALAKDNNSNAFGKLDEKFVNGITSFEYERIKAEETLQRECAVNIAFAANHLANATVDLNEKDSDFLLLKHEDNKDTLGAVARPNILRNILQFFGGKSRWNDFDFSGIDEIQLLDDLRKMIYSLRNSSFHFKTENIDNDSWNTKLIGDMFAYDFNMAGNVQKDKMYSNNVPMFYSTSDIEKMLDRLYAEVHERASQVPSFNSVFVRKNFPDYLKNDLKITSAFGVDDALKWQSAVYYVCKEIYYNDFLQNPETFTMLKDYVQCLPIDIDKSMDQKLKSERNAHKNFKEAFATYCKECDSLSAICQMIMTEYNNQNKGNRKVISARTKDGDKLIYKHYKMILFEALKNVFTIYLEKNINTYGFLKKPKLINNVPAIEEFLPNYNGRQYETLVNRITEETELQKWYIVGRLLNPKQVNQLIGNFRSYVQYVNDVARRAKQTGNNLSNDNIAWDVKNIIQIFDVCTKLNGVTSNILEDYFDDGDDYARYLKNFVDYTNKNNDHSATLLGDFCAKEIDGIKIGIYHDGTNPIVNRNIIQCKLYGATGIISDLTKDGSILSVDYEIIKKYMQMQKEIKVYQQKGICKTKEEQQNLKKYQELKNIVELRNIIDYSEILDELQGQLINWGYLRERDLMYFQLGFHYLCLHNESKKPVGYNNAGDISGAVLYQIVAMYTNGLSLIDANGKSKKNAKASAGAKVGSFCSYSKEIRGVDKDTKEDDDPIYLAGVELFENINEHQQCINLRNYIEHFHYYAKHDRSMLDLYSEVFDRFFTYDMKYTKNVPNMMYNILLQHLVVPAFEFGSSEKRLDDNDEQTKPRAMFTLREKNGLSSEQFTYRLGDGNSTVKLSARGDDYLRAVASLLYYPDRAPEGLIRDAEAEDKFAKINHSNPKSDNRNNRGNFKNPKVQWYNNKTKRK

SEQ ID NO: 60 - protein, 1343 aa, Butyrivibrio sp.
MKISKVDHRKTAVKITDNKGAEGFIYQDPTRDSSTMEQIISNRARSSKVLFNIFGDTKKSKDLNKYTESLIIYVNKAIKSLKGDKRNNKYEEITESLKTERVLNALIQAGNEFTCSENNIEDALNKYLKKSFRVGNTKSALKKLLMAAYCGYKLSIEEKEEIQNYFVDKLVKEYNKDTVLKYTAKSLKHQNMVVQPDTDNHVFLPSRIAGATQNKMSEKEALTEFLKAYAVLDEEKRHNLRIILRKLVNLYFYESPDFIYPENNEWKEHDDRKNKTETFVSPVKVNEEKNGKTFVKIDVPATKDLIRLKNIECYRRSVAETAGNPITYFTDHNISKFWIHHIENEVEKIFALLKSNWKDYQFSVGYISEKVWKEIINYLSIKYIAIGKAVYNYALEDIKKNDGTLNFGVIDPSFYDGINSFEYEKIKAEETFQREVAVYVSFAVNHLSSATVKLSEAQSDMLVLNKNDIEKIAYGNTKRNILQFFGGQSKWKEFDFDRYINPVNYTDIDFLFDIKKMVYSLRNESFHFTTTDTESDWNKNLISAMFEYECRRISTVQKNKFFSNNLPLFYGENSLERVLHKLYDDYVDRMSQVPSFGNVFVRKKFPDYMKEIGIKHNLSSEDNLKLQGALYFLYKEIYYNAFISSEKAMKIFVDLVNKLDTNARDDKGRITHEAMAHKNFKDAISHYMTHDCSLADICQKIMTEYNQQNTGHRKKQTTYSSEKNPEIFRHYKMILFMLLQKAMTEYISSEEIFDFIMKPNSPKTDIKEEEFLPQYKSCAYDNLIKLIADNVELQKWYITARLLSPREVNQLIGSFRSYKQFVSDIERRAKETNNSLSKSGMTVDVENITKVLDLCTKLNGRFSNELTDYFDSKDDYAVYVSKFLDFGFKIDEKFPAALLGEFCNKEENGKKIGIYHNGTEPILNSNIIKSKLYGITDVVSRAVKPVSEKLIREYLQQEVKIKPYLENGVCKNKEEQAALRKYQELKNRIEFRDIVEYSEIINELMGQLINFSYLRERDLMYFQLGFHYLCLNNYGAKPEGYYSIVNDKRTIKGAILYQIVAMYTYGLPIYHYVDGTISDRRKNKKTVLDTLNSSETVGAKIKYFIYYSDELFNDSLILYNAGLELFENINEHENIVNLRKYIDHFKYYVSQDRSLLDIYSEVFDRYFTYDRKYKKNVMNLFSNIMLKHFIITDFEFSTGEKTIGEKNTAKKECAKVRIKRGGLSSDKFTYKFKDAKPIELSAKNTEFLDGVARILYYPENVVLTDLVRNSEVEDEKRIEKYDRNHNSSPTRKDKTYKQDVKKNYNKKTSKAFDSSKLDTKSVGNNLSDNPVLKQFLSESKKKR

SEQ ID NO: 61 - protein, 1276 aa, Blautia sp.; identical to SEQ ID NO: 53

SEQ ID NO: 62 - protein, 1168 aa, Leptotrichia marseille
MKITKIDGISHKKYIKEGKLVKSTSEENKTDERLSELLTIRLDTYIKNPDNASEEENRIRRENLKEFFSNKVLYLKDGILYLKDRREKNQLQNKNYSEEDISEYDLKNKNNFLVLKKILLNEDINSEELEIFRNDFEKKLDKINSLKYSLEENKANYQKINENNIKKVEGKSKRNIFYNYYKDSAKRNDYINNIQEAFDKLYKKEDIENLFFLIENSKKHEKYKIRECYHKIIGRKNDKENFATIIYEEIQNVNNMKELIEKVPNVSELKKSQVFYKYYLNKEKLNDENIKYVFCHFVEIEMSKLLKNYVYKKPSNISNDKVKRIFEYQSLKKLIENKLLNKLDTYVRNCGKYSFYLQDGEIATSDFIVGNRQNEAFLRNIIGVSSTAYFSLRNILETENENDITGRMRGKTVKNNKGEEKYISGEIDKLYDNNKQNEVKKNLKMFYSYDFNMNSKKEIEDFFSNIDEAISSIRHGIVHFNLELEGKDIFTFKNIVPSQISKKMFHDEINEKKLKLKIFKQLNSANVFRYLEKYKILNYLNRTRFEFVNKNIPFVPSFTKLYSRIDDLKNSLGIYWKTPKTNDDNKTKEITDAQIYLLKNIYYGEFLNYFMSNNGNFFEITKEIIELNKNDKRNLKTGFYKLQKFENLQEKTPKEYLANIQSLYMINAGNQDEEEKDTYIDFIQKIFLKGFMTYLANNGRLSLIYIGSDEETNTSLAEKKQEFDKFLKKYEQNNNIEIPYEINEFVREIKLGKILKYTERLNMFYLILKLLNHKELTNLKGSLEKYQSANKEEAFSDQLELINLLNLDNNRVTEDFELEADEIGKFLDFNGNKVKDNKELKKFDTNKIYFDGENIIKHRAFYNIKKYGMLNLLEKISDEAKYKISIEELKNYSKKKNEIEENHTTQENLHRKYARPRKDEKFTDEDYKKYEKAIRNIQQYTHLKNKVEFNELNLLQSLLLRILHRLVGYTSIWERDLRFRLKGEFPENQYIEEIFNFDNSKNVKYKNGQIVEKYINFYKELYKDDTEKISIYSDKKVKELKKEKKDLYIRNYIAHFNYIPNAEISLLEMLENLRKLLSYDRKLKNAIMKSIVDILKEYGFVVTFKIEKDKKIRIESLKSEEVVHLKKLKLKDNDKKKEPIKTYRNSKELCKLVKVMFEYKMKEKKSEN

SEQ ID NO: 63 - protein, 1138 aa, Bacterioides ihuae
MRITKVKVKESSDQKDKMVLIHRKVGEGTLVLDENLADLTAPIIDKYKDKSFELSLLKQTLVSEKEMNIPKCDKCTAKERCLSCKQREKRLKEVRGAIEKTIGAVIAGRDIIPRLNIFNEDEICWLIKPKLRNEFTFKDVNKQVVKLNLPKVLVEYSKKNDPTLFLAYQQWIAAYLKNKKGHIKKSILNNRVVIDYSDESKLSKRKQALELWGEEYETNQRIALESYHTSYNIGELVTLLPNPEEYVSDKGEIRPAFHYKLKNVLQMHQSTVFGTNEILCINPIFNENRANIQLSAYNLEVVKYFEHYFPIKKKKKNLSLNQAIYYLKVETLKERLSLQLENALRMNLLQKGKIKKHEFDKNTCSNTLSQIKRDEFFVLNLVEMCAFAANNIRNIVDKEQVNEILSKKDLCNSLSKNTIDKELCTKFYGADFSQIPVAIWAMRGSVQQIRNEIVHYKAEAIDKIFALKTFEYDDMEKDYSDTPFKQYLELSIEKIDSFFIEQLSSNDVLNYYCTEDVNKLLNKCKLSLRRTSIPFAPGFKTIYELGCHLQDSSNTYRIGHYLMLIGGRVANSTVTKASKAYPAYRFMLKLIYNHLFLNKFLDNHNKRFFMKAVAFVLKDNRENARNKFQYAFKEIRMMNNDESIASYMSYIHSLSVQEQEKKGDKNDKVRYNTEKFIEKVFVKGFDDFLSWLGVEFILSPNQEERDKTVTREEYENLMIKDRVEHSINSNQESHIAFFTFCKLLDANHLSDLRNEWIKFRSSGDKEGFSYNFAIDIIELCLLTVDRVEQRRDGYKEQTELKEYLSFFIKGNESENTVWKGFYFQQDNYTPVLYSPIELIRKYGTLELLKLIIVDEDKITQGEFEEWQTLKKVVEDKVTRRNELHQEWEDMKNKSSFSQEKCSIYQKLCRDIDRYNWLDNKLHLVHLRKLHNLVIQILSRMARFIALWDRDFVLLDASRANDDYKLLSFFNFRDFINAKKTKTDDELLAEFGSKIEKKNAPFIKAEDVPLMVECIEAKRSFYQKVFFRNNLQVLADRNFIAHYNYISKTAKCSLFEMIIKLRTLMYYDRKLRNAVVKSIANVFDQNGMVLQLSLDDSHELKVDKVISKRIVHLKNNNIMTDQVPEEYYKICRRLLEMKK

SEQ ID NO: 64 - protein, 697 aa, Porphyromonadaceae bacterium
MEFRDSIFKSLLQKEIEKAPLCFAEKLISGGVFSYYPSERLKEFVGNHPFSLFRKTMPFSPGFKRVMKSGGNYQNANRDGRFYDLDIGVYLPKDGFGDEEWNARYFLMKLIYNQLFLPYFADAENHLFRECVDFVKRVNRDYNCKNNNSEEQAFIDIRSMREDESIADYLAFIQSNIIIEENKKKETNKEGQINFNKFLLQVFVKGFDSFLKDRTELNFLQLPELQGDGTRGDDLESLDKLGAVVAVDLKLDATGIDADLNENISFYTFCKLLDSNHLSRLRNEIIKYQSANSDFSHNEDFDYDRIISIIELCMLSADHVSTNDNESIFPNNDKDFSGIRPYLSTDAKVETFEDLYVHSDAKTPITNATMVLNWKYGTDKLFERLMISDQDFLVTEKDYFVWKELKKDIEEKIKLREELHSLWVNTPKGKKGAKKKNGRETTGEFSEENKKEYLEVCREIDRYVNLDNKLHFVHLKRMHSLLIELLGRFVGFTYLFERDYQYYHLEIRSRRNKDAGVVDKLEYNKIKDQNKYDKDDFFACTFLYEKANKVRNFIAHFNYLTMWNSPQEEEHNSNLSGAKNSSGRQNLKCSLTELINELREVMSYDRKLKNAVTKAVIDLFDKHGMVIKFRIVNNNNNDNKNKHHLELDDIVPKKIMHLRGIKLKRQDGKPIPIQTDSVDPLYCRMWKKLLDLKPTPF

SEQ ID NO: 65 - protein, 204 aa, Listeria riparia
MHDAWAENPKKPQSDAFLKEYKACCEAIDTYNWHKNKATLVYVNELHHLLIDILGRLVGYVAIADRDFQCMANQYLKSSGHTERVDSWINTIRKNRPDYIEKLDIFMNKAGLFVSEKNGRNYIAHLNYLSPKHKYSLLYLFEKLREMLKYDRKLKNAVTKSLIDLLDKHGMCVVFANLKNNKHRLVIASLKPKKIETFKWKKIK

SEQ ID NO: 66 - protein, 1082 aa, Insolitispirillum peregrinum
MRIIRPYGSSTVASPSPQDAQPLRSLQRQNGTFDVAEFSRRHPELVLAQWVAMLDKIIRKPAPGKNSTALPRPTAEQRRLRQQVGAALWAEMQRHTPVPPELKAVWDSKVHPYSKDNAPATAKTPSHRGRWYDRFGDPETSAATVAEGVRRHLLDSAQPFRANGGQPKGKGVIEHRALTIQNGTLLHHHQSEKAGPLPEDWSTYRADELVSTIGKDARWIKVAASLYQHYGRIFGPTTPISEAQTRPEFVLHTAVKAYYRRLFKERKLPAERLERLLPRTGEALRHAVTVQHGNRSLADAVRIGKILHYGWLQNGEPDPWPDDAALYSSRYWGSDGQTDIKHSEAVSRVWRRALTAAQRTLTSWLYPAGTDAGDILLIGQKPDSIDRNRLPLLYGDSTRHWTRSPGDVWLFLKQTLENLRNSSFHFKTLSAFTSHLDGTCESEPAEQQAAQALWQDDRQQDHQQVFLSLRALDATTYLPTGPLHRIVNAVQSTDATLPLPRFRRVVTRAANTRLKGFPVEPVNRRTMEDDPLLRCRYGVLKLLYERGFRAWLETRPSIASCLDQSLKRSTKAAQTINGKNSPQGVEILSRATKLLQAEGGGGHGIHDLFDRLYAATAREMRVQVGYHHDAEAARQQAEFIEDLKCEVVARAFCAYLKTLGIQGDTFRRQPEPLPTWPDLPDLPSSTIGTAQAALYSVLHLMPVEDVGSLLHQLRRWLVALQARGGEDGTAITATIPLLELYLNRHDAKFSGGGAGTGLRWDDWQVFFDCQATFDRVFPPGPALDSHRLPLRGLREVLRFGRVNDLAALIGQDKITAAEVDRWHTAEQTIAAQQQRREALHEQLSRKKGTDAEVDEYRALVTAIADHRHLTAHVTLSNVVRLHRLMTTVLGRLVDYGGLWERDLTFVTLYEAHRLGGLRNLLSESRVNKFLDGQTPAALSKKNNAEENGMISKVLGDKARRQIRNDFAHFNMLQQGKKTINLTDEINNARKLMAHDRKLKNAITRSVTTLLQQDGLDIVWTMDASHRLTDAKIDSRNAIHLHKTHNRANIREPLHGKSYCRWVAALFGATSTPSATKKSDKIR

SEQ ID NO: 67 - protein, 1224 aa, Bergeyella zoohelcum
MENKTSLGNNIYYNPFKPQDKSYFAGYFNAAMENTDSVFRELGKRLKGKEYTSENFFDAIFKENISLVEYERYVKLLSDYFPMARLLDKKEVPIKERKENFKKNFKGIIKAVRDLRNFYTHKEHGEVEITDEIFGVLDEMLKSTVLTVKKKKVKTDKTKEILKKSIEKQLDILCQKKLEYLRDTARKIEEKRRNQRERGEKELVAPFKYSDKRDDLIAAIYNDAFDVYIDKKKDSLKESSKAKYNTKSDPQQEEGDLKIPISKNGVVFLLSLFLTKQEIHAFKSKIAGFKATVIDEATVSEATVSHGKNSICFMATHEIFSHLAYKKLKRKVRTAEINYGEAENAEQLSVYAKETLMMQMLDELSKVPDVVYQNLSEDVQKTFIEDWNEYLKENNGDVGTMEEEQVIHPVIRKRYEDKFNYFAIRFLDEFAQFPTLRFQVHLGNYLHDSRPKENLISDRRIKEKITVFGRLSELEHKKALFIKNTETNEDREHYWEIFPNPNYDFPKENISVNDKDFPIAGSILDREKQPVAGKIGIKVKLLNQQYVSEVDKAVKAHQLKQRKASKPSIQNIIEEIVPINESNPKEAIVFGGQPTAYLSMNDIHSILYEFFDKWEKKKEKLEKKGEKELRKEIGKELEKKIVGKIQAQIQQIIDKDTNAKILKPYQDGNSTAIDKEKLIKDLKQEQNILQKLKDEQTVREKEYNDFIAYQDKNREINKVRDRNHKQYLKDNLKRKYPEAPARKEVLYYREKGKVAVWLANDIKRFMPTDFKNEWKGEQHSLLQKSLAYYEQCKEELKNLLPEKVFQHLPFKLGGYFQQKYLYQFYTCYLDKRLEYISGLVQQAENFKSENKVFKKVENECFKFLKKQNYTHKELDARVQSILGYPIFLERGFMDEKPTIIKGKTFKGNEALFADWFRYYKEYQNFQTFYDTENYPLVELEKKQADRKRKTKIYQQKKNDVFTLLMAKHIFKSVFKQDSIDQFSLEDLYQSREERLGNQERARQTGERNTNYIWNKTVDLKLCDGKITVENVKLKNVGDFIKYEYDQRVQAFLKYEENIEWQAFLIKESKEEENYPYVVEREIEQYEKVRREELLKEVHLIEEYILEKVKDKEILKKGDNQNFKYYILNGLLKQLKNEDVESYKVFNLNTEPEDVNINQLKQEATDLEQKAFVLTYIRNKFAHNQLPKKEFWDYCQEKYGKIEKEKTYAEYFAEVFKKEKEALIK

SEQ ID NO: 68 - protein, 1126 aa, Prevotella intermedia
MEDDKKTTDSIRYELKDKHFWAAFLNLARHNVYITVNHINKILEEGEINRDGYETTLKNTWNEIKDINKKDRLSKLIIKHFPFLEAATYRLNPTDTTKQKEEKQAEAQSLESLRKSFFVFIYKLRDLRNHYSHYKHSKSLERPKFEEGLLEKMYNIFNASIRLVKEDYQYNKDINPDEDFKHLDRTEEEFNYYFTKDNEGNITESGLLFFVSLFLEKKDAIWMQQKLRGFKDNRENKKKMTNEVFCRSRMLLPKLRLQSTQTQDWILLDMLNELIRCPKSLYERLREEDREKFRVPIEIADEDYDAEQEPFKNTLVRHQDRFPYFALRYFDYNEIFTNLRFQIDLGTYHFSIYKKQIGDYKESHHLTHKLYGFERIQEFTKQNRPDEWRKFVKTFNSFETSKEPYIPETTPHYHLENQKIGIRFRNDNDKIWPSLKTNSEKNEKSKYKLDKSFQAEAFLSVHELLPMMFYYLLLKTENTDNDNEIETKKKENKNDKQEKHKIEEIIENKITEIYALYDTFANGEIKSIDELEEYCKGKDIEIGHLPKQMIAILKDEHKVMATEAERKQEEMLVDVQKSLESLDNQINEEIENVERKNSSLKSGKIASWLVNDMMRFQPVQKDNEGKPLNNSKANSTEYQLLQRTLAFFGSEHERLAPYFKQTKLIESSNPHPFLKDTEWEKCNNILSFYRSYLEAKKNFLESLKPEDWEKNQYFLKLKEPKTKPKTLVQGWKNGFNLPRGIFTEPIRKWFMKHRENITVAELKRVGLVAKVIPLFFSEEYKDSVQPFYNYHFNVGNINKPDEKNFLNCEERRELLRKKKDEFKKMTDKEKEENPSYLEFKSWNKFERELRLVRNQDIVTWLLCMELFNKKKIKELNVEKIYLKNINTNTTKKEKNTEEKNGEEKNIKEKNNILNRIMPMRLPIKVYGRENFSKNKKKKIRRNTFFTVYIEEKGTKLLKQGNFKALERDRRLGGLFSFVKTPSKAESKSNTISKLRVEYELGEYQKARIEIIKDMLALEKTLIDKYNSLDTDNFNKMLTDWLELKGEPDKASFQNDVDLLIAVRNAFSHNQYPMRNRIAFANINPFSLSSANTSEEKGLGIANQLKDKTHKTIEKIIEIEKPIETKE

SEQ ID NO: 69 - protein, 1127 aa, Prevotella buccae
MQKQDKLFVDRKKNAIFAFPKYITIMENKEKPEPIYYELTDKHFWAAFLNLARHNVYTTINHINRRLEIAELKDDGYMMGIKGSWNEQAKKLDKKVRLRDLIMKHFPFLEAAAYEMTNSKSPNNKEQREKEQSEALSLNNLKNVLFIFLEKLQVLRNYYSHYKYSEESPKPIFETSLLKNMYKVFDANVRLVKRDYMHHENIDMQRDFTHLNRKKQVGRTKNIIDSPNFHYHFADKEGNMTIAGLLFFVSLFLDKKDAIWMQKKLKGFKDGRNLREQMTNEVFCRSRISLPKLKLENVQTKDWMQLDMLNELVRCPKSLYERLREKDRESFKVPFDIFSDDYNAEEEPFKNTLVRHQDRFPYFVLRYFDLNEIFEQLRFQIDLGTYHFSIYNKRIGDEDEVRHLTHHLYGFARIQDFAPQNQPEEWRKLVKDLDHFETSQEPYISKTAPHYHLENEKIGIKFCSAHNNLFPSLQTDKTCNGRSKFNLGTQFTAEAFLSVHELLPMMFYYLLLTKDYSRKESADKVEGIIRKEISNIYAIYDAFANNEINSIADLTRRLQNTNILQGHLPKQMISILKGRQKDMGKEAERKIGEMIDDTQRRLDLLCKQTNQKIRIGKRNAGLLKSGKIADWLVNDMMRFQPVQKDQNNIPINNSKANSTEYRMLQRALALFGSENFRLKAYFNQMNLVGNDNPHPFLAETQWEHQTNILSFYRNYLEARKKYLKGLKPQNWKQYQHFLILKVQKTNRNTLVTGWKNSFNLPRGIFTQPIREWFEKHNNSKRIYDQILSFDRVGFVAKAIPLYFAEEYKDNVQPFYDYPFNIGNRLKPKKRQFLDKKERVELWQKNKELFKNYPSEKKKTDLAYLDFLSWKKFERELRLIKNQDIVTWLMFKELFNMATVEGLKIGEIHLRDIDTNTANEESNNILNRIMPMKLPVKTYETDNKGNILKERPLATFYIEETETKVLKQGNFKALVKDRRLNGLFSFAETTDLNLEEHPISKLSVDLELIKYQTTRISIFEMTLGLEKKLIDKYSTLPTDSFRNMLERWLQCKANRPELKNYVNSLIAVRNAFSHNQYPMYDATLFAEVKKFTLFPSVDTKKIELNIAPQLLEIVGKAIKEIEKSENKN

SEQ ID NO: 70 - protein, 1135 aa, Porphyrmonas gingivalis
MNTVPASENKGQSRTVEDDPQYFGLYLNLARENLIEVESHVRIKFGKKKLNEESLKQSLLCDHLLSVDRWTKVYGHSRRYLPFLHYFDPDSQIEKDHDSKTGVDPDSAQRLIRELYSLLDFLRNDFSHNRLDGTTFEHLEVSPDISSFITGTYSLACGRAQSRFAVFFKPDDFVLAKNRKEQLISVADGKECLTVSGFAFFICLFLDREQASGMLSRIRGFKRTDENWARAVHETFCDLCIRHPHDRLESSNTKEALLLDMLNELNRCPRILYDMLPEEERAQFLPALDENSMNNLSENSLDEESRLLWDGSSDWAEALTKRIRHQDRFPYLMLRFIEEMDLLKGIRFRVDLGEIELDSYSKKVGRNGEYDRTITDHALAFGKLSDFQNEEEVSRMISGEASYPVRFSLFAPRYAIYDNKIGYCHTSDPVYPKSKTGEKRALSNPQSMGFISVHDLRKLLLMELLCEGSFSRMQSDFLRKANRILDETAEGKLQFSALFPEMRHRFIPPQNPKSKDRREKAETTLEKYKQEIKGRKDKLNSQLLSAFDMDQRQLPSRLLDEWMNIRPASHSVKLRTYVKQLNEDCRLRLRKFRKDGDGKARAIPLVGEMATFLSQDIVRMIISEETKKLITSAYYNEMQRSLAQYAGEENRRQFRAIVAELRLLDPSSGHPFLSATMETAHRYTEGFYKCYLEKKREWLAKIFYRPEQDENTKRRISVFFVPDGEARKLLPLLIRRRMKEQNDLQDWIRNKQAHPIDLPSHLFDSKVMELLKVKDGKKKWNEAFKDWWSTKYPDGMQPFYGLRRELNIHGKSVSYIPSDGKKFADCYTHLMEKTVRDKKRELRTAGKPVPPDLAADIKRSFHRAVNEREFMLRLVQEDDRLMLMAINKMMTDREEDILPGLKNIDSILDEENQFSLAVHAKVLEKEGEGGDNSLSLVPATIEIKSKRKDWSKYIRYRYDRRVPGLMSHFPEHKATLDEVKTLLGEYDRCRIKIFDWAFALEGAIMSDRDLKPYLHESSSREGKSGEHSTLVKMLVEKKGCLTPDESQYLILIRNKAAHNQFPCAAEMPLIYRDVSAKVGSIEGSSAKDLPEGSSLVDSLWKKYEMIIRKILPILDPENRFFGKLLNNMSQPINDL

SEQ ID NO: 71 - protein, 1115 aa, Bacteroides pyrogenes
MESIKNSQKSTGKTLQKDPPYFGLYLNMALLNVRKVENHIRKWLGDVALLPEKSGFHSLLTTDNLSSAKWTRFYYKSRKFLPFLEMFDSDKKSYENRRETAECLDTIDRQKISSLLKEVYGKLQDIRNAFSHYHIDDQSVKHTALIISSEMHRFIENAYSFALQKTRARFTGVFVETDFLQAEEKGDNKKFFAIGGNEGIKLKDNALIFLICLFLDREEAFKFLSRATGFKSTKEKGFLAVRETFCALCCRQPHERLLSVNPREALLMDMLNELNRCPDILFEMLDEKDQKSFLPLLGEEEQAHILENSLNDELCEAIDDPFEMIASLSKRVRYKNRFPYLMLRYIEEKNLLPFIRFRIDLGCLELASYPKKMGEENNYERSVTDHAMAFGRLTDFHNEDAVLQQITKGITDEVRFSLYAPRYAIYNNKIGFVRTSGSDKISFPTLKKKGGEGHCVAYTLQNTKSFGFISIYDLRKILLLSFLDKDKAKNIVSGLLEQCEKHWKDLSENLFDAIRTELQKEFPVPLIRYTLPRSKGGKLVSSKLADKQEKYESEFERRKEKLTEILSEKDFDLSQIPRRMIDEWLNVLPTSREKKLKGYVETLKLDCRERLRVFEKREKGEHPLPPRIGEMATDLAKDIIRMVIDQGVKQRITSAYYSEIQRCLAQYAGDDNRRHLDSIIRELRLKDTKNGHPFLGKVLRPGLGHTEKLYQRYFEEKKEWLEATFYPAASPKRVPRFVNPPTGKQKELPLIIRNLMKERPEWRDWKQRKNSHPIDLPSQLFENEICRLLKDKIGKEPSGKLKWNEMFKLYWDKEFPNGMQRFYRCKRRVEVFDKVVEYEYSEEGGNYKKYYEALIDEVVRQKISSSKEKSKLQVEDLTLSVRRVFKRAINEKEYQLRLLCEDDRLLFMAVRDLYDWKEAQLDLDKIDNMLGEPVSVSQVIQLEGGQPDAVIKAECKLKDVSKLMRYCYDGRVKGLMPYFANHEATQEQVEMELRHYEDHRRRVFNWVFALEKSVLKNEKLRRFYEESQGGCEHRRCIDALRKASLVSEEEYEFLVHIRNKSAHNQFPDLEIGKLPPNVTSGFCECIWSKYKAIICRIIPFIDPERRFFGKLLEQK

SEQ ID NO: 72 - protein, 953 aa, Alistipes sp.
MSNEIGAFREHQFAYAPGNEKQEEATFATYFNLALSNVEGMMFGEVESNPDKIEKSLDTLPPAILRQIASFIWLSKEDHPDKAYSTEEVKVIVTDLVRRLCFYRNYFSHCFYLDTQYFYSDELVDTTAIGEKLPYNFHHFITNRLFRYSLPEITLFRWNEGERKYEILRDGLIFFCCLFLKRGQAERFLNELRFFKRTDEEGRIKRTIFTKYCTRESHKHIGIEEQDFLIFQDIIGDLNRVPKVCDGVVDLSKENERYIKNRETSNESDENKARYRLLIREKDKFPYYLMRYIVDFGVLPCITFKQNDYSTKEGRGQFHYQDAAVAQEERCYNFVVRNGNVYYSYMPQAQNVVRISELQGTISVEELRNMVYASINGKDVNKSVEQYLYHLHLLYEKILTISGQTIKEGRVDVEDYRPLLDKLLLRPASNGEELRRELRKLLPKRVCDLLSNRFDCSEGVSAVEKRLKAILLRHEQLLLSQNPALHIDKIKSVIDYLYLFFSDDEKFRQQPTEKAHRGLKDEEFQMYHYLVGDYDSHPLALWKELEASGRLKPEMRKLTSATSLHGLYMLCLKGTVEWCRKQLMSIGKGTAKVEAIADRVGLKLYDKLKEYTPEQLEREVKLVVMHGYAAAATPKPKAQAAIPSKLTELRFYSFLGKREMSFAAFIRQDKKAQKLWLRNFYTVENIKTLQKRQAAADAACKKLYNLVGEVERVHTNDKVLVLVAQRYRERLLNVGSKCAVTLDNPERQQKLADVYEVQNAWLSIRFDDLDFTLTHVNLSNLRKAYNLIPRKHILAFKEYLDNRVKQKLCEECRNVRRKEDLCTCCSPRYSNLTSWLKENHSESSIEREAATMMLLDVERKLLSFLLDERRKAIIEYGKFIPFSALVKECRLADAGLCGIRNDVLHDNVISYADAIGKLSAYFPKEASEAVEYIRRTKEVREQRREELMANSSQ

SEQ ID NO: 73 - protein, 1322 aa, Prevotella sp.
MSKECKKQRQEKKRRLQKANFSISLTGKHVFGAYFNMARTNFVKTINYILPIAGVRGNYSENQINKMLHALFLIQAGRNEELTTEQKQWEKKLRLNPEQQTKFQKLLFKHFPVLGPMMADVADHKAYLNKKKSTVQTEDETFAMLKGVSLADCLDIICLMADTLTECRNFYTHKDPYNKPSQLADQYLHQEMIAKKLDKVVVASRRILKDREGLSVNEVEFLTGIDHLHQEVLKDEFGNAKVKDGKVMKTFVEYDDFYFKISGKRLVNGYTVTTKDDKPVNVNTMLPALSDFGLLYFCVLFLSKPYAKLFIDEVRLFEYSPFDDKENMIMSEMLSIYRIRTPRLHKIDSHDSKATLAMDIFGELRRCPMELYNLLDKNAGQPFFHDEVKHPNSHTPDVSKRLRYDDRFPTLALRYIDETELFKRIRFQLQLGSFRYKFYDKENCIDGRVRVRRIQKEINGYGRMQEVADKRMDKWGDLIQKREERSVKLEHEELYINLDQFLEDTADSTPYVTDRRPAYNIHANRIGLYWEDSQNPKQYKVFDENGMYIPELVVTEDKKAPIKMPAPRCALSVYDLPAMLFYEYLREQQDNEFPSAEQVIIEYEDDYRKFFKAVAEGKLKPFKRPKEFRDFLKKEYPKLRMADIPKKLQLFLCSHGLCYNNKPETVYERLDRLTLQHLEERELHIQNRLEHYQKDRDMIGNKDNQYGKKSFSDVRHGALARYLAQSMMEWQPTKLKDKEKGHDKLTGLNYNVLTAYLATYGHPQVPEEGFTPRTLEQVLINAHLIGGSNPHPFINKVLALGNRNIEELYLHYLEEELKHIRSRIQSLSSNPSDKALSALPFIHHDRMRYHERTSEEMMALAARYTTIQLPDGLFTPYILEILQKHYTENSDLQNALSQDVPVKLNPTCNAAYLITLFYQTVLKDNAQPFYLSDKTYTRNKDGEKAESFSFKRAYELFSVLNNNKKDTFPFEMIPLFLTSDEIQERLSAKLLDGDGNPVPEVGEKGKPATDSQGNTIWKRRIYSEVDDYAEKLTDRDMKISFKGEWEKLPRWKQDKIIKRRDETRRQMRDELLQRMPRYIRDIKDNERTLRRYKTQDMVLFLLAEKMFTNIISEQSSEFNWKQMRLSKVCNEAFLRQTLTFRVPVTVGETTIYVEQENMSLKNYGEFYRFLTDDRLMSLLNNIVETLKPNENGDLVIRHTDLMSELAAYDQYRSTIFMLIQSIENLIITNNAVLDDPDADGFWVREDLPKRNNFASLLELINQLNNVELTDDERKLLVAIRNAFSHNSYNIDFSLIKDVKHLPEVAKGILQHLQSMLGVEITK

SEQ ID NO: 74 - protein, 1322 aa, Prevotella sp.; identical to SEQ ID NO: 73

SEQ ID NO: 75 - protein, 1095 aa, Riemerella anatipestifer
MEKPLLPNVYTLKHKFFWGAFLNIARHNAFITICHINEQLGLKTPSNDDKIVDVVCETWNNILNNDHDLLKKSQLTELILKHFPFLTAMCYHPPKKEGKKKGHQKEQQKEKESEAQSQAEALNPSKLIEALEILVNQLHSLRNYYSHYKHKKPDAEKDIFKHLYKAFDASLRMVKEDYKAHFTVNLTRDFAHLNRKGKNKQDNPDFNRYRFEKDGFFTESGLLFFTNLFLDKRDAYWMLKKVSGFKASHKQREKMTTEVFCRSRILLPKLRLESRYDHNQMLLDMLSELSRCPKLLYEKLSEENKKHFQVEADGFLDEIEEEQNPFKDTLIRHQDRFPYFALRYLDLNESFKSIRFQVDLGTYHYCIYDKKIGDEQEKRHLTRTLLSFGRLQDFTEINRPQEWKALTKDLDYKETSNQPFISKTTPHYHITDNKIGFRLGTSKELYPSLEIKDGANRIAKYPYNSGFVAHAFISVHELLPLMFYQHLTGKSEDLLKETVRHIQRIYKDFEEERINTIEDLEKANQGRLPLGAFPKQMLGLLQNKQPDLSEKAKIKIEKLIAETKLLSHRLNTKLKSSPKLGKRREKLIKTGVLADWLVKDFMRFQPVAYDAQNQPIKSSKANSTEFWFIRRALALYGGEKNRLEGYFKQTNLIGNTNPHPFLNKFNWKACRNLVDFYQQYLEQREKFLEAIKNQPWEPYQYCLLLKIPKENRKNLVKGWEQGGISLPRGLFTEAIRETLSEDLMLSKPIRKEIKKHGRVGFISRAITLYFKEKYQDKHQSFYNLSYKLEAKAPLLKREEHYEYWQQNKPQSPTESQRLELHTSDRWKDYLLYKRWQHLEKKLRLYRNQDVMLWLMTLELTKNHFKELNLNYHQLKLENLAVNVQEADAKLNPLNQTLPMVLPVKVYPATAFGEVQYHKTPIRTVYIREEHTKALKMGNFKALVKDRRLNGLFSFIKEENDTQKHPISQLRLRRELEIYQSLRVDAFKETLSLEEKLLNKHTSLSSLENEFRALLEEWKKEYAASSMVTDEHIAFIASVRNAFCHNQYPFYKEALHAPIPLFTVAQPTTEEKDGLGIAEALLKVLREYCEIVKSQI

SEQ ID NO: 76 - protein, 1124 aa, Prevotella aurantiaca
MEDDKKTTGSISYELKDKHFWAAFLNLARHNVYITINHINKLLEIREIDNDEKVLDIKTLWQKGNKDLNQKARLRELMTKHFPFLETAIYTKNKEDKKEVKQEKQAEAQSLESLKDCLFLFLDKLQEARNYYSHYKYSEFSKEPEFEEGLLEKMYNIFGNNIQLVINDYQHNKDINPDEDFKHLDRKGQFKYSFADNEGNITESGLLFFVSLFLEKKDAIWMQQKLNGFKDNLENKKKMTHEVFCRSRILMPKLRLESTQTQDWILLDMLNELIRCPKSLYERLQGDDREKFKVPFDPADEDYNAEQEPFKNTLIRHQDRFPYFVLRYFDYNEIFKNLRFQIDLGTYHFSIYKKLIGGQKEDRHLTHKLYGFERIQEFAKQNRPDEWKAIVKDLDTYETSNKRYISETTPHYHLENQKIGIRFRNGNKEIWPSLKTNDENNEKSKYKLDKQYQAEAFLSVHELLPMMFYYLLLKKEKPNNDEINASIVEGFIKREIRNIFKLYDAFANGEINNIDDLEKYCADKGIPKRHLPKQMVAILYDEHKDMVKEAKRKQKEMVKDTKKLLATLEKQTQKEKEDDGRNVKLLKSGEIARWLVNDMMRFQPVQKDNEGKPLNNSKANSTEYQMLQRSLALYNNEEKPTRYFRQVNLIESNNPHPFLKWTKWEECNNILTFYYSYLTKKIEFLNKLKPEDWKKNQYFLKLKEPKTNRETLVQGWKNGFNLPRGIFTEPIREWFKRHQNNSKEYEKVEALDRVGLVTKVIPLFFKEEYFKDKEENFKEDTQKEINDCVQPFYNFPYNVGNIHKPKEKDFLHREERIELWDKKKDKFKGYKEKIKSKKLTEKDKEEFRSYLEFQSWNKFERELRLVRNQDIVTWLLCKELIDKLKIDELNIEELKKLRLNNIDTDTAKKEKNNILNRVMPMELPVTVYEIDDSHKIVKDKPLHTIYIKEAETKLLKQGNFKALVKDRRLNGLFSFVKTNSEAESKRNPISKLRVEYELGEYQEARIEIIQDMLALEEKLINKYKDLPTNKFSEMLNSWLEGKDEADKARFQNDVDFLIAVRNAFSHNQYPMHNKIEFANIKPFSLYTANNSEEKGLGIANQLKDKTKETTDKIKKIEKPIETKE

SEQ ID NO: 77 - protein, 1151 aa, Prevotella saccharolytica
MEDKPFWAAFFNLARHNVYLTVNHINKLLDLEKLYDEGKHKEIFEREDIFNISDDVMNDANSNGKKRKLDIKKIWDDLDTDLTRKYQLRELILKHFPFIQPAIIGAQTKERTTIDKDKRSTSTSNDSLKQTGEGDINDLLSLSNVKSMFFRLLQILEQLRNYYSHVKHSKSATMPNFDEDLLNWMRYIFIDSVNKVKEDYSSNSVIDPNTSFSHLIYKDEQGKIKPCRYPFTSKDGSINAFGLLFFVSLFLEKQDSIWMQKKIPGFKKASENYMKMTNEVFCRNHILLPKIRLETVYDKDWMLLDMLNEVVRCPLSLYKRLTPAAQNKFKVPEKSSDNANRQEDDNPFSRILVRHQNRFPYFVLRFFDLNEVFTTLRFQINLGCYHFAICKKQIGDKKEVHHLIRTLYGFSRLQNFTQNTRPEEWNTLVKTTEPSSGNDGKTVQGVPLPYISYTIPHYQIENEKIGIKIFDGDTAVDTDIWPSVSTEKQLNKPDKYTLTPGFKADVFLSVHELLPMMFYYQLLLCEGMLKTDAGNAVEKVLIDTRNAIFNLYDAFVQEKINTITDLENYLQDKPILIGHLPKQMIDLLKGHQRDMLKAVEQKKAMLIKDTERRLKLLDKQLKQETDVAAKNTGTLLKNGQIADWLVNDMMRFQPVKRDKEGNPINCSKANSTEYQMLQRAFAFYATDSCRLSRYFTQLHLIHSDNSHLFLSRFEYDKQPNLIAFYAAYLKAKLEFLNELQPQNWASDNYFLLLRAPKNDRQKLAEGWKNGFNLPRGLFTEKIKTWFNEHKTIVDISDCDIFKNRVGQVARLIPVFFDKKFKDHSQPFYRYDFNVGNVSKPTEANYLSKGKREELFKSYQNKFKNNIPAEKTKEYREYKNFSLWKKFERELRLIKNQDILIWLMCKNLFDEKIKPKKDILEPRIAVSYIKLDSLQTNTSTAGSLNALAKVVPMTLAIHIDSPKPKGKAGNNEKENKEFTVYIKEEGTKLLKWGNFKTLLADRRIKGLFSYIEHDDIDLKQHPLTKRRVDLELDLYQTCRIDIFQQTLGLEAQLLDKYSDLNTDNFYQMLIGWRKKEGIPRNIKEDTDFLKDVRNAFSHNQYPDSKKIAFRRIRKFNPKELILEEEEGLGIATQMYKEVEKVVNRIKRIELFD

SEQ ID NO: 78 - protein, 1159 aa, Myroides odoratimim
MKDILTTDTTEKQNRFYSHKIADKYFFGGYFNLASNNIYEVFEEVNKRNTFGKLAKRDNGNLKNYIIHVFKDELSISDFEKRVAIFASYFPILETVDKKSIKERNRTIDLTLSQRIRQFREMLISLVTAVDQLRNFYTHYHHSDIVIENKVLDFLNSSFVSTALHVKDKYLKTDKTKEFLKETIAAELDILIEAYKKKQIEKKNTRFKANKREDILNAIYNEAFWSFINDKDKDKDKETVVAKGADAYFEKNHHKSNDPDFALNISEKGIVYLLSFFLTNKEMDSLKANLTGFKGKVDRESGNSIKYMATQRIYSFHTYRGLKQKIRTSEEGVKETLLMQMIDELSKVPNVVYQHLSTTQQNSFIEDWNEYYKDYEDDVETDDLSRVIHPVIRKRYEDRFNYFAIRFLDEFFDFPTLRFQVHLGDYVHDRRTKQLGKVESDRIIKEKVTVFARLKDINSAKASYFHSLEEQDKEELDNKWTLFPNPSYDFPKEHTLQHQGEQKNAGKIGIYVKLRDTQYKEKAALEEARKSLNPKERSATKASKYDIITQIIEANDNVKSEKPLVFTGQPIAYLSMNDIHSMLFSLLTDNAELKKTPEEVEAKLIDQIGKQINEILSKDTDTKILKKYKDNDLKETDTDKITRDLARDKEEIEKLILEQKQRADDYNYTSSTKFNIDKSRKRKHLLFNAEKGKIGVWLANDIKRFMFKESKSKWKGYQHTELQKLFAYFDTSKSDLELILSNMVMVKDYPIELIDLVKKSRTLVDFLNKYLEARLEYIENVITRVKNSIGTPQFKTVRKECFTFLKKSNYTVVSLDKQVERILSMPLFIERGFMDDKPTMLEGKSYKQHKEKFADWFVHYKENSNYQNFYDTEVYEITTEDKREKAKVTKKIKQQQKNDVFTLMMVNYMLEEVLKLSSNDRLSLNELYQTKEERIVNKQVAKDTQERNKNYIWNKVVDLQLCDGLVHIDNVKLKDIGNFRKYENDSRVKEFLTYQSDIVWSAYLSNEVDSNKLYVIERQLDNYESIRSKELLKEVQEIECSVYNQVANKESLKQSGNENFKQYVLQGLLPIGMDVREMLILSTDVKFKKEEIIQLGQAGEVEQDLYSLIYIRNKFAHNQLPIKEFFDFCENNYRSISDNEYYAEYYMEIFRSIKEKYAN

SEQ ID NO: 79 - protein, 1120 aa, Prevotella intermedia
MEDDKKTTDSIRYELKDKHFWAAFLNLARHNVYITVNHINKILEEDEINRDGYENTLENSWNEIKDINKKDRLSKLIIKHFPFLEATTYRQNPTDTTKQKEEKQAEAQSLESLKKSFFVFIYKLRDLRNHYSHYKHSKSLERPKFEEDLQNKMYNIFDVSIQFVKEDYKHNTDINPKKDFKHLDRKRKGKFHYSFADNEGNITESGLLFFVSLFLEKKDAIWVQKKLEGFKCSNKSYQKMTNEVFCRSRMLLPKLRLESTQTQDWILLDMLNELIRCPKSLYERLQGVNRKKFYVSFDPADEDYDAEQEPFKNTLVRHQDRFPYFALRYFDYNEVFANLRFQIDLGTYHFSIYKKLIGGQKEDRHLTHKLYGFERIQEFDKQNRPDEWKAIVKDSDTFKKKEEKEEEKPYISETTPHYHLENKKIGIAFKNHNIWPSTQTELTNNKRKKYNLGTSIKAEAFLSVHELLPMMFYYLLLKTENTKNDNKVGGKKETKKQGKHKIEAIIESKIKDIYALYDAFANGEINSEDELKEYLKGKDIKIVHLPKQMIAILKNEHKDMAEKAEAKQEKMKLATENRLKTLDKQLKGKIQNGKRYNSAPKSGEIASWLVNDMMRFQPVQKDENGESLNNSKANSTEYQLLQRTLAFFGSEHERLAPYFKQTKLIESSNPHPFLNDTEWEKCSNILSFYRSYLKARKNFLESLKPEDWEKNQYFLMLKEPKTNRETLVQGWKNGFNLPRGFFTEPIRKWFMEHWKSIKVDDLKRVGLVAKVTPLFFSEKYKDSVQPFYNYPFNVGDVNKPKEEDFLHREERIELWDKKKDKFKGYKAKKKFKEMTDKEKEEHRSYLEFQSWNKFERELRLVRNQDIVTWLLCTELIDKLKIDELNIKELKKLRLKDINTDTAKKEKNNILNRVMPMELPVTVYKVNKGGYIIKNKPLHTIYIKEAETKLLKQGNFKALVKDRRLNGLFSFVKTPSEAESESNPISKLRVEYELGKYQNARLDIIEDMLALEKKLIDKYNSLDTDNFHNMLTGWLELKGEAKKARFQNDVKLLTAVRNAFSHNQYPMYDENLFGNIERFSLSSSNIIESKGLDIAAKLKEEVSKAAKKIQNEEDNKKEKET

SEQ ID NO: 80 - protein, 1199 aa, Capnocytophaga canimorsus
MKNIQRLGKGNEFSPFKKEDKFYFGGFLNLANNNIEDFFKEIITRFGIVITDENKKPKETFGEKILNEIFKKDISIVDYEKWVNIFADYFPFTKYLSLYLEEMQFKNRVICFRDVMKELLKTVEALRNFYTHYDHEPIKIEDRVFYFLDKVLLDVSLTVKNKYLKTDKTKEFLNQHIGEELKELCKQRKDYLVGKGKRIDKESEIINGIYNNAFKDFICKREKQDDKENHNSVEKILCNKEPQNKKQKSSATVWELCSKSSSKYTEKSFPNRENDKHCLEVPISQKGIVFLLSFFLNKGEIYALTSNIKGFKAKITKEEPVTYDKNSIRYMATHRMFSFLAYKGLKRKIRTSEINYNEDGQASSTYEKETLMLQMLDELNKVPDVVYQNLSEDVQKTFIEDWNEYLKENNGDVGTMEEEQVIHPVIRKRYEDKFNYFAIRFLDEFAQFPTLRFQVHLGNYLCDKRTKQICDTTTEREVKKKITVFGRLSELENKKAIFLNEREEIKGWEVFPNPSYDFPKENISVNYKDFPIVGSILDREKQPVSNKIGIRVKIADELQREIDKAIKEKKLRNPKNRKANQDEKQKERLVNEIVSTNSNEQGEPVVFIGQPTAYLSMNDIHSVLYEFLINKISGEALETKIVEKIETQIKQIIGKDATTKILKPYTNANSNSINREKLLRDLEQEQQILKTLLEEQQQREKDKKDKKSKRKHELYPSEKGKVAVWLANDIKRFMPKAFKEQWRGYHHSLLQKYLAYYEQSKEELKNLLPKEVFKHFPFKLKGYFQQQYLNQFYTDYLKRRLSYVNELLLNIQNFKNDKDALKATEKECFKFFRKQNYIINPINIQIQSILVYPIFLKRGFLDEKPTMIDREKFKENKDTELADWFMHYKNYKEDNYQKFYAYPLEKVEEKEKFKRNKQINKQKKNDVYTLMMVEYIIQKIFGDKFVEENPLVLKGIFQSKAERQQNNTHAATTQERNLNGILNQPKDIKIQGKITVKGVKLKDIGNFRKYEIDQRVNTFLDYEPRKEWMAYLPNDWKEKEKQGQLPPNNVIDRQISKYETVRSKILLKDVQELEKIISDEIKEEHRHDLKQGKYYNFKYYILNGLLRQLKNENVENYKVFKLNTNPEKVNITQLKQEATDLEQKAFVLTYIRNKFAHNQLPKKEFWDYCQEKYGKIEKEKTYAEYFAEVFKREKEALIK

SEQ ID NO: 81 - protein, 1175 aa, Porphyromonas gulae
MTEQSERPYNGTYYTLEDKHFWAAFLNLARHNAYITLTHIDRQLAYSKADITNDQDVLSFKALWKNFDNDLERKSRLRSLILKHFSFLEGAAYGKKLFESKSSGNKSSKNKELTKKEKEELQANALSLDNLKSILFDFLQKLKDFRNYYSHYRHSGSSELPLFDGNMLQRLYNVFDVSVQRVKIDHEHNDEVDPHYHFNHLVRKGKKDRYGHNDNPSFKHHFVDGEGMVTEAGLLFFVSLFLEKRDAIWMQKKIRGFKGGTETYQQMTNEVFCRSRISLPKLKLESLRMDDWMLLDMLNELVRCPKPLYDRLREDDRACFRVPVDILPDEDDTDGGGEDPFKNTLVRHQDRFPYFALRYFDLKKVFTSLRFHIDLGTYHFAIYKKMIGEQPEDRHLTRNLYGFGRIQDFAEEHRPEEWKRLVRDLDYFETGDKPYISQTSPHYHIEKGKIGLRFMPEGQHLWPSPEVGTTRTGRSKYAQDKRLTAEAFLSVHELMPMMFYYFLLREKYSEEVSAERVQGRIKRVIEDVYAVYDAFARDEINTRDELDACLADKGIRRGHLPRQMIAILSQEHKDMEEKIRKKLQEMMADTDHRLDMLDRQTDRKIRIGRKNAGLPKSGVIADWLVRDMMRFQPVAKDASGKPLNNSKANSTEYRMLQRALALFGGEKERLTPYFRQMNLTGGNNPHPFLHETRWESHTNILSFYRSYLRARKAFLERIGRSDRVENRPFLLLKEPKTDRQTLVAGWKGEFHLPRGIFTEAVRDCLIEMGHDEVASYKEVGFMAKAVPLYFERACEDRVQPFYDSPFNVGNSLKPKKGRFLSKEERAEEWERGKERFRDLEAWSYSAARRIEDAFAGIEYASPGNKKKIEQLLRDLSLWEAFESKLKVRADRINLAKLKKEILEAQEHPYHDFKSWQKFERELRLVKNQDIITWMMCRDLMEENKVEGLDTGTLYLKDIRPNVQEQGSLNVLNRVKPMRLPVVVYRADSRGHVHKEEAPLATVYIEERDTKLLKQGNFKSFVKDRRLNGLFSFVDTGGLAMEQYPISKLRVEYELAKYQTARVCVFELTLRLEESLLTRYPHLPDESFREMLESWSDPLLAKWPELHGKVRLLIAVRNAFSHNQYPMYDEAVFSSIRKYDPSSPDAIEERMGLNIAHRLSEEVKQAKETVERIIQA

SEQ ID NO: 82 - protein, 1090 aa, Prevotella sp.
MNIPALVENQKKYFGTYSVMAMLNAQTVLDHIQKVADIEGEQNENNENLWFHPVMSHLYNAKNGYDKQPEKTMFIIERLQSYFPFLKIMAENQREYSNGKYKQNRVEVNSNDIFEVLKRAFGVLKMYRDLTNHYKTYEEKLNDGCEFLTSTEQPLSGMINNYYTVALRNMNERYGYKTEDLAFIQDKRFKFVKDAYGKKKSQVNTGFFLSLQDYNGDTQKKLHLSGVGIALLICLFLDKQYINIFLSRLPIFSSYNAQSEERRIIIRSFGINSIKLPKDRIHSEKSNKSVAMDMLNEVKRCPDELFTTLSAEKQSRFRIISDDHNEVLMKRSSDRFVPLLLQYIDYGKLFDHIRFHVNMGKLRYLLKADKTCIDGQTRVRVIEQPLNGFGRLEEAETMRKQENGTFGNSGIRIRDFENMKRDDANPANYPYIVDTYTHYILENNKVEMFINDKEDSAPLLPVIEDDRYVVKTIPSCRMSTLEIPAMAFHMFLFGSKKTEKLIVDVHNRYKRLFQAMQKEEVTAENIASFGIAESDLPQKILDLISGNAHGKDVDAFIRLTVDDMLTDTERRIKRFKDDRKSIRSADNKMGKRGFKQISTGKLADFLAKDIVLFQPSVNDGENKITGLNYRIMQSAIAVYDSGDDYEAKQQFKLMFEKARLIGKGTTEPHPFLYKVFARSIPANAVEFYERYLIERKFYLTGLSNEIKKGNRVDVPFIRRDQNKWKTPAMKTLGRIYSEDLPVELPRQMFDNEIKSHLKSLPQMEGIDFNNANVTYLIAEYMKRVLDDDFQTFYQWNRNYRYMDMLKGEYDRKGSLQHCFTSVEEREGLWKERASRTERYRKQASNKIRSNRQMRNASSEEIETILDKRLSNSRNEYQKSEKVIRRYRVQDALLFLLAKKTLTELADFDGERFKLKEIMPDAEKGILSEIMPMSFTFEKGGKKYTITSEGMKLKNYGDFFVLASDKRIGNLLELVGSDIVSKEDIMEEFNKYDQCRPEISSIVFNLEKWAFDTYPELSARVDREEKVDFKSILKILLNNKNINKEQSDILRKIRNAFDHNNYPDKGVVEIKALPEIAMSIKKAFGEYAIMK

SEQ ID NO: 83 - protein, 1150 aa, Flavobacterium branchiophilum
MENLNKILDKENEICISKIFNTKGIAAPITEKALDNIKSKQKNDLNKEARLHYFSIGHSFKQIDTKKVFDYVLIEELKDEKPLKFITLQKDFFTKEFSIKLQKLINSIRNINNHYVHNFNDINLNKIDSNVFHFLKESFELAIIEKYYKVNKKYPLDNEIVLFLKELFIKDENTALLNYFTNLSKDEAIEYILTFTITENKIWNINNEHNILNIEKGKYLTFEAMLFLITIFLYKNEANHLLPKLYDFKNNKSKQELFTFFSKKFTSQDIDAEEGHLIKFRDMIQYLNHYPTAWNNDLKLESENKNKIMTTKLIDSIIEFELNSNYPSFATDIQFKKEAKAFLFASNKKRNQTSFSNKSYNEEIRHNPHIKQYRDEIASALTPISFNVKEDKFKIFVKKHVLEEYFPNSIGYEKFLEYNDFTEKEKEDFGLKLYSNPKTNKLIERIDNHKLVKSHGRNQDRFMDFSMRFLAENNYFGKDAFFKCYKFYDTQEQDEFLQSNENNDDVKFHKGKVTTYIKYEEHLKNYSYWDCPFVEENNSMSVKISIGSEEKILKIQRNLMIYFLENALYNENVENQGYKLVNNYYRELKKDVEESIASLDLIKSNPDFKSKYKKILPKRLLHNYAPAKQDKAPENAFETLLKKADFREEQYKKLLKKAEHEKNKEDFVKRNKGKQFKLHFIRKACQMMYFKEKYNTLKEGNAAFEKKDPVIEKRKNKEHEFGHHKNLNITREEFNDYCKWMFAFNGNDSYKKYLRDLFSEKHFFDNQEYKNLFESSVNLEAFYAKTKELFKKWIETNKPTNNENRYTLENYKNLILQKQVFINVYHFSKYLIDKNLLNSENNVIQYKSLENVEYLISDFYFQSKLSIDQYKTCGKLFNKLKSNKLEDCLLYEIAYNYIDKKNVHKIDIQKILTSKIILTINDANTPYKISVPFNKLERYTEMIAIKNQNNLKARFLIDLPLYLSKNKIKKGKDSAGYEIIIKNDLEIEDINTINNKIINDSVKFTEVLMELEKYFILKDKCILSKNYIDNSEIPSLKQFSKVWIKENENEIINYRNIACHFHLPLLETFDNLLLNVEQKFIKEELQNVSTINDLSKPQEYLILLFIKFKHNNFYLNLFNKNESKTIKNDKEVKKNRVLQKFINQVILKKK

SEQ ID NO: 84 - protein, 1159 aa, Myroides odoratimum
MKDILTTDTTEKQNRFYSHKIADKYFFGGYFNLASNNIYEVFEEVNKRNTFGKLAKRDNGNLKNYIIHVFKDELSISDFEKRVAIFASYFPILETVDKKSIKERNRTIDLTLSQRIRQFREMLISLVTAVDQLRNFYTHYHHSDIVIENKVLDFLNSSFVSTALHVKDKYLKTDKTKEFLKETIAAELDILIEAYKKKQIEKKNTRFKANKREDILNAIYNEAFWSFINDKDKDKDKETVVAKGADAYFEKNHHKSNDPDFALNISEKGIVYLLSFFLTNKEMDSLKANLTGFKGKVDRESGNSIKYMATQRIYSFHTYRGLKQKIRTSEEGVKETLLMQMIDELSKVPNVVYQHLSTTQQNSFIEDWNEYYKDYEDDVETDDLSRVTHPVIRKRYEDRFNYFAIRFLDEFFDFPTLRFQVHLGDYVHDRRTKQLGKVESDRIIKEKVTVFARLKDINSAKASYFHSLEEQDKEELDNKWTLFPNPSYDFPKEHTLQHQGEQKNAGKIGIYVKLRDTQYKEKAALEEARKSLNPKERSATKASKYDIITQIIEANDNVKSEKPLVFTGQPIAYLSMNDIHSMLFSLLTDNAELKKTPEEVEAKLIDQIGKQINEILSKDTDTKILKKYKDNDLKETDTDKITRDLARDKEEIEKLILEQKQRADDYNYTSSTKFNIDKSRKRKHLLFNAEKGKIGVWLANDIKRFMFKESKSKWKGYQHIELQKLFAYFDTSKSDLELILSNMVMVKDYPIELIDLVKKSRTLVDFLNKYLEARLEYIENVITRVKNSIGTPQFKTVRKECFTFLKKSNYTVVSLDKQVERILSMPLFIERGFMDDKPTMLEGKSYKQHKEKFADWFVHYKENSNYQNFYDTEVYEITTEDKREKAKVTKKIKQQQKNDVFTLMMVNYMLEEVLKLSSNDRLSLNELYQTKEERIVNKQVAKDTQERNKNYIWNKVVDLQLCDGLVHIDNVKLKDIGNFRKYENDSRVKEFLTYQSDIVWSAYLSNEVDSNKLYVIERQLDNYESIRSKELLKEVQEIECSVYNQVANKESLKQSGNENFKQYVLQGLLPIGMDVREMLILSTDVKFKKEEIIQLGQAGEVEQDLYSLIYIRNKFAHNQLPIKEFFDFCENNYRSISDNEYYAEYYMEIFRSIKEKYAN

SEQ ID NO: 85 - protein, 1214 aa, Flavobacterium columnare
MSSKNESYNKQKTFNHYKQEDKYFFGGFLNNADDNLRQVGKEFKTRINFNHNNNELASVFKDYFNKEKSVAKREHALNLLSNYFPVLERIQKHTNHNFEQTREIFELLLDTIKKLRDYYTHHYHKPITINPKIYDFLDDTLLDVLITIKKKKVKNDTSRELLKEKLRPELTQLKNQKREELIKKGKKLLEENLENAVFNHCLIPFLEENKTDDKQNKTVSLRKYRKSKPNEETSITLTQSGLVFLMSFFLHRKEFQVFTSGLERFKAKVNTIKEEEISLNKNNIVYMITHWSYSYYNFKGLKHRIKTDQGVSTLEQNNTTHSLTNTNTKEALLTQIVDYLSKVPNEIYETLSEKQQKEFEEDINEYMRENPENEDSTFSSIVSHKVIRKRYENKFNYFAMRFLDEYAELPTLRFMVNFGDYIKDRQKKILESIQFDSERIIKKEIHLFEKLSLVTEYKKNVYLKETSNIDLSRFPLFPNPSYVMANNNIPFYIDSRSNNLDEYLNQKKKAQSQNKKRNLTFEKYNKEQSKDAIIAMLQKEIGVKDLQQRSTIGLLSCNELPSMLYEVIVKDIKGAELENKIAQKIREQYQSIRDFTLDSPQKDNIPTTLIKTINTDSSVTFENQPIDIPRLKNALQKELTLTQEKLLNVKEHEIEVDNYNRNKNTYKFKNQPKNKVDDKKLQRKYVFYRNEIRQEANWLASDLIHFMKNKSLWKGYMHNELQSFLAFFEDKKNDCIALLETVFNLKEDCILTKGLKNLFLKHGNFIDFYKEYLKLKEDFLSTESTFLENGFIGLPPKILKKELSKRLKYIFIVFQKRQFIIKELEEKKNNLYADAINLSRGIFDEKPTMIPFKKPNPDEFASWFVASYQYNNYQSFYELTPDIVERDKKKKYKNLRAINKVKIQDYYLKLMVDTLYQDLFNQPLDKSLSDFYVSKAEREKIKADAKAYQKLNDSSLWNKVIHLSLQNNRITANPKLKDIGKYKRALQDEKIATLLTYDARTWTYALQKPEKENENDYKELHYTALNMELQEYEKVRSKELLKQVQELEKKILDKFYDFSNNASHPEDLEIEDKKGKRHPNFKLYITKALLKNESEIINLENIDIEILLKYYDYNTEELKEKIKNMDEDEKAKIINTKENYNKITNVLIKKALVLIIIRNKMAHNQYPPKFIYDLANRFVPKKEEEYFATYFNRVFETITKELWENKEKKDKTQV

SEQ ID NO: 86 - protein, 1119 aa, Porphymonas gingivalis
MTEQNEKPYNGTYYTLEDKHFWAAFLNLARHNAYITLAHIDRQLAYSKADITNDEDILFFKGQWKNLDNDLERKARLRSLILKHFSFLEGAAYGKKLFESQSSGNKSSKKKELSKKEKEELQANALSLDNLKSILFDFLQKLKDFRNYYSHYRHPESSELPLFDGNMLQRLYNVFDVSVQRVKRDHEHNDKVDPHRHFNHLVRKGKKDKYGNNDNPFFKHHFVDREGTVTEAGLLFFVSLFLEKRDAIWMQKKIRGFKGGTEAYQQMTNEVFCRSRISLPKLKLESLRTDDWMLLDMLNELVRCPKSLYDRLREEDRARFRVPVDILSDEDDTDGTEEDPFKNTLVRHQDRFPYFALRYFDLKKVFTSLRFHIDLGTYHFAIYKKNIGEQPEDRHLTRNLYGFGRIQDFAEEHRPEEWKRLVRDLDYFETGDKPYITQTTPHYHIEKGKIGLRFVPEGQHLWPSPEVGATRTGRSKYAQDKRLTAEAFLSVHELMPMMFYYFLLREKYSEEVSAEKVQGRIKRVIEDVYAVYDAFARDEINTRDELDACLADKGIRRGHLPRQMIAILSQEHKDMEEKVRKKLQEMIADTDHRLDMLDRQTDRKIRIGRKNAGLPKSGVVADWLVRDMMRFQPVAKDTSGKPLNNSKANSTEYRMLQRALALFGGEKERLTPYFRQMNLTGGNNPHPFLHETRWESHTNILSFYRSYLEARKAFLQSIGRSDRVENHRFLLLKEPKTDRQTLVAGWKGEFHLPRGIFTEAVRDCLIEMGYDEVGSYKEVGFMAKAVPLYFERASKDRVQPFYDYPFNVGNSLKPKKGRFLSKEKRAEEWESGKERFRLAKLKKEILEAKEHPYHDFKSWQKFERELRLVKNQDIITWMMCRDLMEENKVEGLDTGTLYLKDIRTDVQEQGSLNVLNRVKPMRLPVVVYRADSRGHVHKEQAPLATVYIEERDTKLLKQGNFKSFVKDRRLNGLFSFVDTGALAMEQYPISKLRVEYELAKYQTARVCAFEQTLELEESLLTRYPHLPDKNFRKMLESWSDPLLDKWPDLHGNVRLLIAVRNAFSHNQYPMYDETLFSSIRKYDPSSPDAIEERMGLNIAHRLSEEVKQAKEMVERIIQA

SEQ ID NO: 87 - protein, 1175 aa, Porphyromonas sp.
MTEQSERPYNGTYYTLEDKHFWAAFLNLARHNAYITLTHIDRQLAYSKADITNDQDVLSFKALWKNFDNDLERKSRLRSLILKHFSFLEGAAYGKKLFESKSSGNKSSKNKELTKKEKEELQANALSLDNLKSILFDFLQKLKDFRNYYSHYRHSESSELPLFDGNMLQRLYNVFDVSVQRVKRDHEHNDKVDPHRHFNHLVRKGKKDRYGHNDNPSFKHHFVDSEGMVTEAGLLFFVSLFLEKRDAIWMQKKIRGFKGGTETYQQMTNEVFCRSRISLPKLKLESLRTDDWMLLDMLNELVRCPKPLYDRLREDDRACFRVPVDILPDEDDTDGGGEDPFKNTLVRHQDRFPYFALRYFDLKKVFTSLRFHIDLGTYHFAIYKKMIGEQPEDRHLTRNLYGFGRIQDFAEEHRPEEWKRLVRDLDYFETGDKPYISQTTPHYHIEKGKIGLRFVPEGQHLWPSPEVGTTRTGRSKYAQDKRLTAEAFLSVHELMPMMFYYFLLREKYSEEVSAEKVQGRIKRVIEDVYAIYDAFARDEINTLKELDACLADKGIRRGHLPKQMIGILSQERKDMEEKVRKKLQEMIADTDHRLDMLDRQTDRKIRIGRKNAGLPKSGVIADWLVRDMMRFQPVAKDTSGKPLNNSKANSTEYRMLQRALALFGGEKERLTPYFRQMNLTGGNNPHPFLHETRWESHTNILSFYRSYLRARKAFLERIGRSDRVENCPFLLLKEPKTDRQTLVAGWKGEFHLPRGIFTEAVRDCLIEMGYDEVGSYREVGFMAKAVPLYFERACEDRVQPFYDSPFNVGNSLKPKKGRFLSKEDRAEEWERGKERFRDLEAWSHSAARRIKDAFAGIEYASPGNKKKIEQLLRDLSLWEAFESKLKVRADKINLAKLKKEILEAQEHPYHDFKSWQKFERELRLVKNQDIITWMMCRDLMEENKVEGLDTGTLYLKDIRPNVQEQGSLNVLNRVKPMRLPVVVYRADSRGHVHKEEAPLATVYIEERDTKLLKQGNFKSFVKDRRLNGLFSFVDTGGLAMEQYPISKLRVEYELAKYQTARVCVFELTLRLEESLLSRYPHLPDESFREMLESWSDPLLAKWPELHGKVRLLIAVRNAFSHNQYPMYDEAVFSSIRKYDPSSPDAIEERMGLNIAHRLSEEVKQAKETVERIIQA

SEQ ID NO: 88 - protein, 1132 aa, Prevotella intermedia
MEDDKKTKESTNMLDNKHFWAAFLNLARHNVYITVNHINKVLELKNKKDQDIIIDNDQDILAIKTHWEKVNGDLNKTERLRELMTKHFPFLETAIYTKNKEDKEEVKQEKQAKAQSFDSLKHCLFLFLEKLQEARNYYSHYKYSESTKEPMLEKELLKKMYNIFDDNIQLVIKDYQHNKDINPDEDFKHLDRTEEEFNYYFTTNKKGNITASGLLFFVSLFLEKKDAIWMQQKLRGFKDNRESKKKMTHEVFCRSRMLLPKLRLESTQTQDWILLDMLNELIRCPKSLYERLQGEYRKKFNVPFDSADEDYDAEQEPFKNTLVRHQDRFPYFALRYFDYNEIFTNLRFQIDLGTYHFSIYKKLIGGQKEDRHLTHKLYGFERIQEFAKQNRTDEWKAIVKDFDTYETSEEPYISETAPHYHLENQKIGIRFRNDNDEIWPSLKTNGENNEKRKYKLDKQYQAEAFLSVHELLPMMFYYLLLKKEEPNNDKKNASIVEGFIKREIRDIYKLYDAFANGEINNIDDLEKYCEDKGIPKRHLPKQMVAILYDEHKDMAEEAKRKQKEMVKDTKKLLATLEKQTQGEIEDGGRNIRLLKSGEIARWLVNDMMRFQPVQKDNEGNPLNNSKANSTEYQMLQRSLALYNKEEKPTRYFRQVNLINSSNPHPFLKWTKWEECNNILSFYRSYLTKKIEFLNKLKPEDWEKNQYFLKLKEPKTNRETLVQGWKNGFNLPRGIFTEPIREWFKRHQNDSEEYEKVETLDRVGLVTKVIPLFFKKEDSKDKEEYLKKDAQKEINNCVQPFYGFPYNVGNIHKPDEKDFLPSEERKKLWGDKKYKFKGYKAKVKSKKLTDKEKEEYRSYLEFQSWNKFERELRLVRNQDIVTWLLCTELIDKLKVEGLNVEELKKLRLKDIDTDTAKQEKNNILNRVMPMQLPVTVYEIDDSHNIVKDRPLHTVYIEETKTKLLKQGNFKALVKDRRLNGLFSFVDTSSETELKSNPISKSLVEYELGEYQNARIETIKDMLLLEETLIEKYKTLPTDNFSDMLNGWLEGKDEADKARFQNDVKLLVAVRNAFSHNQYPMRNRIAFANINPFSLSSADTSEEKKLDIANQLKDKTHKIIKRIIEIEKPIETKE

SEQ ID NO: 89 - protein, 1134 aa, Prevotella intermedia
MKMEDDKKTKESTNMLDNKHFWAAFLNLARHNVYITVNHINKVLELKNKKDQDIIIDNDQDILAIKTHWEKVNGDLNKTERLRELMTKHFPFLETAIYTKNKEDKEEVKQEKQAKAQSFDSLKHCLFLFLEKLQEARNYYSHYKYSESTKEPMLEKELLKKMYNIFDDNIQLVIKDYQHNKDINPDEDFKHLDRTEEEFNYYFTTNKKGNITASGLLFFVSLFLEKKDAIWMQQKLRGFKDNRESKKKMTHEVFCRSRMLLPKLRLESTQTQDWILLDMLNELIRCPKSLYERLQGEYRKKFNVPFDSADEDYDAEQEPFKNTLVRHQDRFPYFALRYFDYNEIFTNLRFQIDLGTYHFSIYKKLIGGQKEDRHLTHKLYGFERIQEFAKQNRTDEWKAIVKDFDTYETSEEPYISETAPHYHLENQKIGIRFRNDNDEIWPSLKTNGENNEKRKYKLDKQYQAEAFLSVHELLPMMFYYLLLKKEEPNNDKKNASIVEGFIKREIRDIYKLYDAFANGEINNIDDLEKYCEDKGIPKRHLPKQMVAILYDEHKDMAEEAKRKQKEMVKDTKKLLATLEKQTQGEIEDGGRNIRLLKSGEIARWLVNDMMRFQPVQKDNEGNPLNNSKANSTEYQMLQRSLALYNKEEKPTRYFRQVNLINSSNPHPFLKWTKWEECNNILSFYRSYLTKKIEFLNKLKPEDWEKNQYFLKLKEPKTNRETLVQGWKNGFNLPRGIFTEPIREWFKRHQNDSEEYEKVETLDRVGLVTKVIPLFFKKEDSKDKEEYLKKDAQKEINNCVQPFYGFPYNVGNIHKPDEKDFLPSEERKKLWGDKKYKFKGYKAKVKSKKLTDKEKEEYRSYLEFQSWNKFERELRLVRNQDIVTWLLCTELIDKLKVEGLNVEELKKLRLKDIDTDTAKQEKNNILNRVMPMQLPVTVYEIDDSHNIVKDRPLHTVYIEETKTKLLKQGNFKALVKDRRLNGLFSFVDTSSETELKSNPISKSLVEYELGEYQNARIETIKDMLLLEETLIEKYKTLPTDNFSDMLNGWLEGKDEADKARFQNDVKLLVAVRNAFSHNQYPMRNRIAFANINPFSLSSADTSEEKKLDIANQLKDKTHKIIKRIIEIEKPIETKE

SEQ ID NO: 90 - protein, 1133 aa, Prevotella intermedia
MEDDKKTTDSISYELKDKHFWAAFLNLARHNVYITVNHINKVLELKNKKDQDIIIDNDQDILAIKTHWEKVNGDLNKTERLRELMTKHFPFLETAIYSKNKEDKEEVKQEKQAKAQSFDSLKHCLFLFLEKLQETRNYYSHYKYSESTKEPMLEKELLKKMYNIFDDNIQLVIKDYQHNKDINPDEDFKHLDRTEEDFNYYFTRNKKGNITESGLLFFVSLFLEKKDAIWMQQKLRGFKDNRESKKKMTHEVFCRSRMLLPKLRLESTQTQDWILLDMLNELIRCPKSLYERLQGEDREKFKVPFDPADEDYDAEQEPFKNTLVRHQDRFPYFALRYFDYNEIFTNLRFQIDLGTFHFSIYKKLIGGQKEDRHLTHKLYGFERIQEFAKQNRPDEWKAIVKDLDTYETSNERYISETTPHYHLENQKIGIRFRNDNDEIWPSLKTNGENNEKSKYKLDKQYQAEAFLSVHELLPMMFYYLLLKKEEPNNDKKNASIVEGFIKREIRDMYKLYDAFANGEINNIDDLEKYCEDKGIPKRHLPKQMVAILYDEHKDMVKEAKRKQRKMVKDTEKLLAALEKQTQEKTEDGGRNIRLLKSGEIARWLVNDMMRFQPVQKDNEGNPLNNSKANSTEYQMLQRSLALYNKEEKPTRYFRQVNLINSSNPHPFLKWTKWEECNNILSFYRSYLTKKIEFLNKLKPEDWEKNQYFLKLKEPKTNRETLVQGWKNGFNLPRGIFTEPIREWFKRHQNDSKEYEKVEALDRVGLVTKVIPLFFKKEDSKDKEEDLKKDAQKEINNCVQPFYSFPYNVGNIHKPDEKDFLHREERIELWDKKKDKFKGYKAKVKSKKLTDKEKEEYRSYLEFQSWNKFERELRLVRNQDIVTWLLCTELIDKLKVEGLNVEELKKLRLKDIDTDTAKQEKNNILNRVMPMQLPVTVYEIDDSHNIVKDRPLHTVYIEETKTKLLKQGNFKALVKDRRLNGLFSFVDTSSEAELKSNPISKSLVEYELGEYQNARIETIKDMLLLEETLIEKYKNLPTDNFSDMLNGWLEGKDEADKARFQNDVKLLVAVRNAFSHNQYPMRNRIAFANINPFSLSSADTSEEKKLDIANQLKDKTHKIIKRIIEIEKPIETKE

SEQ ID NO: 91 - protein, 1127 aa, Prevotella buccae; identical to SEQ ID NO: 69

SEQ ID NO: 92 - protein, 1125 aa, Prevotella pallens
MKEEEKGKTPVVSTYNKDDKHFWAAFLNLARHNVYITVNHINKILGEGEINRDGYENTLEKSWNEIKDINKKDRLSKLIIKHFPFLEVTTYQRNSADTTKQKEEKQAEAQSLESLKKSFFVFIYKLRDLRNHYSHYKHSKSLERPKFEEDLQEKMYNIFDASIQLVKEDYKHNTDIKTEEDFKHLDRKGQFKYSFADNEGNITESGLLFFVSLFLEKKDAIWVQKKLEGFKCSNESYQKMTNEVFCRSRMLLPKLRLQSTQTQDWILLDMLNELIRCPKSLYERLREEDRKKFRVPIEIADEDYDAEQEPFKNALVRHQDRFPYFALRYFDYNEIFTNLRFQIDLGTYHFSIYKKQIGDYKESHHLTHKLYGFERIQEFTKQNRPDEWRKFVKTFNSFETSKEPYIPETTPHYHLENQKIGIRFRNDNDKIWPSLKTNSEKNEKSKYKLDKSFQAEAFLSVHELLPMMFYYLLLKTENTDNDNEIETKKKENKNDKQEKHKIEEIIENKITEIYALYDAFANGKINSIDKLEEYCKGKDIEIGHLPKQMIAILKSEHKDMATEAKRKQEEMLADVQKSLESLDNQINEEIENVERKNSSLKSGEIASWLVNDMMRFQPVQKDNEGNPLNNSKANSTEYQMLQRSLALYNKEEKPTRYFRQVNLIESSNPHPFLNNTEWEKCNNILSFYRSYLEAKKNFLESLKPEDWEKNQYFLMLKEPKTNCETLVQGWKNGFNLPRGIFTEPIRKWFMEHRKNITVAELKRVGLVAKVIPLFFSEEYKDSVQPFYNYLFNVGNINKPDEKNFLNCEERRELLRKKKDEFKKMTDKEKEENPSYLEFQSWNKFERELRLVRNQDIVTWLLCMELFNKKKIKELNVEKIYLKNINTNTTKKEKNTEEKNGEEKIIKEKNNILNRIMPMRLPIKVYGRENFSKNKKKKIRRNTFFTVYIEEKGTKLLKQGNFKALERDRRLGGLFSFVKTHSKAESKSNTISKSRVEYELGEYQKARIEIIKDMLALEETLIDKYNSLDTDNFHNMLTGWLKLKDEPDKASFQNDVDLLIAVRNAFSHNQYPMRNRIAFANINPFSLSSANTSEEKGLGIANQLKDKTHKTIEKIIEIEKPIETKE

SEQ ID NO: 93 - protein, 1157 aa, Myroides odoratimum
MKDILTTDTTEKQNRFYSHKIADKYFFGGYFNLASNNIYEVFEEVNKRNTFGKLAKRDNGNLKNYIIHVFKDELSISDFEKRVAIFASYFPILETVDKKSIKERNRTIDLTLSQRIRQFREMLISLVTAVDQLRNFYTHYHHSEIVIENKVLDFLNSSLVSTALHVKDKYLKTDKTKEFLKETIAAELDILIEAYKKKQIEKKNTRFKANKREDILNAIYNEAFWSFINDKDKDKETVVAKGADAYFEKNHHKSNDPDFALNISEKGIVYLLSFFLTNKEMDSLKANLTGFKGKVDRESGNSIKYMATQRIYSFHTYRGLKQKIRTSEEGVKETLLMQMIDELSKVPNVVYQHLSTTQQNSFIEDWNEYYKDYEDDVETDDLSRVIHPVIRKRYEDRFNYFAIRFLDEFFDFPTLRFQVHLGDYVHDRRTKQLGKVESDRIIKEKVTVFARLKDINSAKANYFHSLEEQDKEELDNKWTLFPNPSYDFPKEHTLQHQGEQKNAGKIGIYVKLRDTQYKEKAALEEARKSLNPKERSATKASKYDIITQIIEANDNVKSEKPLVFTGQPIAYLSMNDIHSMLFSLLTDNAELKKTPEEVEAKLIDQIGKQINEILSKDTDTKILKKYKDNDLKETDTDKITRDLARDKEEIEKLILEQKQRADDYNYTSSTKFNIDKSRKRKHLLFNAEKGKIGVWLANDIKRFMTEEFKSKWKGYQHTELQKLFAYYDTSKSDLDLILSDMVMVKDYPIELIALVKKSRTLVDFLNKYLEARLGYMENVITRVKNSIGTPQFKTVRKECFTFLKKSNYTVVSLDKQVERILSMPLFIERGFMDDKPTMLEGKSYQQHKEKFADWFVHYKENSNYQNFYDTEVYEITTEDKREKAKVTKKIKQQQKNDVFTLMMVNYMLEEVLKLSSNDRLSLNELYQTKEERIVNKQVAKDTQERNKNYIWNKVVDLQLCEGLVRIDKVKLKDIGNFRKYENDSRVKEFLTYQSDIVWSAYLSNEVDSNKLYVIERQLDNYESIRSKELLKEVQEIECSVYNQVANKESLKQSGNENFKQYVLQGLVPIGMDVREMLILSTDVKFIKEEIIQLGQAGEVEQDLYSLIYIRNKFAHNQLPIKEFFDFCENNYRSISDNEYYAEYYMEIFRSIKEKYTS

SEQ ID NO: 94 - protein, 1157 aa, Myroides odoratimum
MKDILTTDTTEKQNRFYSHKIADKYFFGGYFNLASNNIYEVFEEVNKRNTFGKLAKRDNGNLKNYIIHVFKDELSISDFEKRVAIFASYFPILETVDKKSIKERNRTIDLTLSQRIRQFREMLISLVTAVDQLRNFYTHYHHSEIVIENKVLDFLNSSLVSTALHVKDKYLKTDKTKEFLKETIAAELDILIEAYKKKQIEKKNTRFKANKREDILNAIYNEAFWSFINDKDKDKETVVAKGADAYFEKNHHKSNDPDFALNISEKGIVYLLSFFLTNKEMDSLKANLTGFKGKVDRESGNSIKYMATQRIYSFHTYRGLKQKIRTSEEGVKETLLMQMIDELSKVPNVVYQHLSTTQQNSFIEDWNEYYKDYEDDVETDDLSRVIHPVIRKRYEDRFNYFAIRFLDEFFDFPTLRFQVHLGDYVHDRRTKQLGKVESDRIIKEKVTVFARLKDINSAKASYFHSLEEQDKEELDNKWTLFPNPSYDFPKEHTLQHQGEQKNAGKIGIYVKLRDTQYKEKAALEEARKSLNPKERSATKASKYDIITQIIEANDNVKSEKPLVFTGQPIAYLSMNDIHSMLFSLLTDNAELKKTPEEVEAKLIDQIGKQINEILSKDTDTKILKKYKDNDLKETDTDKITRDLARDKEEIEKLILEQKQRADDYNYTSSTKFNIDKSRKRKHLLFNAEKGKIGVWLANDIKRFMFKESKSKWKGYQHTELQKLFAYFDTSKSDLELILSDMVMVKDYPIELIDLVRKSRTLVDFLNKYLEARLGYIENVITRVKNSIGTPQFKTVRKECFAFLKESNYTVASLDKQIERILSMPLFIERGFMDSKPTMLEGKSYQQHKEDFADWFVHYKENSNYQNFYDTEVYEIITEDKREQAKVTKKIKQQQKNDVFTLMMVNYMLEEVLKLPSNDRLSLNELYQTKEERIVNKQVAKDTQERNKNYIWNKVVDLQLCEGLVRIDKVKLKDIGNFRKYENDSRVKEFLTYQSDIVWSGYLSNEVDSNKLYVIERQLDNYESIRSKELLKEVQEIECIVYNQVANKESLKQSGNENFKQYVLQGLLPRGTDVREMLILSTDVKFKKEEIMQLGQVREVEQDLYSLIYIRNKFAHNQLPIKEFFDFCENNYRPISDNEYYAEYYMEIFRSIKEKYAS

SEQ ID NO: 95 - protein, 1224 aa, Bergeyella zoohelcum; identical to SEQ ID NO: 67

SEQ ID NO: 96 - protein, 1150 aa, Prevotella saccharolytica
MMEKENVQGSHIYYEPTDKCFWAAFYNLARHNAYLTIAHINSFVNSKKGINNDDKVLDIIDDWSKFDNDLLMGARLNKLILKHFPFLKAPLYQLAKRKTRKQQGKEQQDYEKKGDEDPEVIQEAIANAFKMANVRKTLHAFLKQLEDLRNHFSHYNYNSPAKKMEVKFDDGFCNKLYYVFDAALQMVKDDNRMNPEINMQTDFEHLVRLGRNRKIPNTFKYNFTNSDGTINNNGLLFFVSLFLEKRDAIWMQKKIKGFKGGTENYMRMTNEVFCRNRMVIPKLRLETDYDNHQLMFDMLNELVRCPLSLYKRLKQEDQDKFRVPIEFLDEDNEADNPYQENANSDENPTEETDPLKNTLVRHQHRFPYFVLRYFDLNEVFKQLRFQINLGCYHFSIYDKTIGERTEKRHLTRTLFGFDRLQNFSVKLQPEHWKNMVKHLDTEESSDKPYLSDAMPHYQIENEKIGIHFLKTDTEKKETVWPSLEVEEVSSNRNKYKSEKNLTADAFLSTHELLPMMFYYQLLSSEEKTRAAAGDKVQGVLQSYRKKIFDIYDDFANGTINSMQKLDERLAKDNLLRGNMPQQMLAILEHQEPDMEQKAKEKLDRLITETKKRIGKLEDQFKQKVRIGKRRADLPKVGSIADWLVNDMMRFQPAKRNADNTGVPDSKANSTEYRLLQEALAFYSAYKDRLEPYFRQVNLIGGTNPHPFLHRVDWKKCNHLLSFYHDYLEAKEQYLSHLSPADWQKHQHFLLLKVRKDIQNEKKDWKKSLVAGWKNGFNLPRGLFTESIKTWFSTDADKVQITDTKLFENRVGLIAKLIPLYYDKVYNDKPQPFYQYPFNINDRYKPEDTRKRFTAASSKLWNEKKMLYKNAQPDSSDKIEYPQYLDFLSWKKLERELRMLRNQDMMVWLMCKDLFAQCTVEGVEFADLKLSQLEVDVNVQDNLNVLNNVSSMILPLSVYPSDAQGNVLRNSKPLHTVYVQENNTKLLKQGNFKSLLKDRRLNGLFSFIAAEGEDLQQHPLTKNRLEYELSIYQTMRISVFEQTLQLEKAILTRNKTLCGNNFNNLLNSWSEHRTDKKTLQPDIDFLIAVRNAFSHNQYPMSTNTVMQGIEKFNIQTPKLEEKDGLGIASQLAKKTKDAASRLQNIINGGTN

SEQ ID NO: 97 - protein, 1175 aa, Porphyromonas gingivalis
MTEQNEKPYNGTYYTLEDKHFWAAFFNLARHNAYITLTHIDRQLAYSKADITNDEDILFFKGQWKNLDNDLERKARLRSLILKHFSFLEGAAYGKKLFESQSSGNKSSKKKELTKKEKEELQANALSLDNLKSILFDFLQKLKDFRNYYSHYRHPESSELPLFDGNMLQRLYNVFDVSVQRVKRDHEHNDKVDPHRHFNHLVRKGKKDRCGNNDNPFFKHHFVDREEKVTEAGLLFFVSLFLEKRDAIWMQKKIRGFKGGTETYQQMTNEVFCRSRISLPKLKLESLRTDDWMLLDMLNELVRCPKSLYDRLREEDRARFRVPVDILSDEDDTDGTEEDPFKNTLVRHQDRFPYFALRYFDLKKVFTSLRFHIDLGTYHFAIYKKNIGEQPEDRHLTRNLYGFGRIQDFAEEHRPEEWKRLVRDLDYFETGDKPYITQTTPHYHIEKGKIGLRFVPEGQLLWPSPEVGATRTGRSKYAQDKRFTAEAFLSVHELMPMMFYYFLLREKYSEEASAERVQGRIKRVIEDVYAVYDAFARGEIDTLDRLDACLADKGIRRGHLPRQMIAILSQEHKDMEEKVRKKLQEMIADTDHRLDMLDRQTDRKIRIGRKNAGLPKSGVIADWLVRDMMRFQPVAKDTSGKPLNNSKANSTEYRMLQRALALFGGEKERLTPYFRQMNLTGGNNPHPFLHETRWESHTNILSFYRSYLKARKAFLQSIGRSDRVENHRFLLLKEPKTDRQTLVAGWKGEFHLPRGIFTEAVRDCLIEMGLDEVGSYKEVGFMAKAVPLYFERACKDRVQPFYDYPFNVGNSLKPKKGRFLSKEKRAEEWESGKERFRDLEAWSHSAARRIEDAFAGIENASRENKKKIEQLLQDLSLWETFESKLKVKADKINIAKLKKEILEAKEHPYLDFKSWQKFERELRLVKNQDIITWMMCRDLMEENKVEGLDTGTLYLKDIRTDVHEQGSLNVLNRVKPMRLPVVVYRADSRGHVHKEQAPLATVYIEERDTKLLKQGNFKSFVKDRRLNGLFSFVDTGALAMEQYPISKLRVEYELAKYQTARVCAFEQTLELEESLLTRYPHLPDKNFRKMLESWSDPLLDKWPDLHGNVRLLIAVRNAFSHNQYPMYDETLFSSIRKYDPSSPDAIEERMGLNIAHRLSEEVKQAKEMVERIIQA

SEQ ID NO: 98 - protein, 1115 aa, Bacterioides pyogenes
MESIKNSQKSTGKTLQKDPPYFGLYLNMALLNVRKVENHIRKWLGDVALLPEKSGFHSLLTTDNLSSAKWTRFYYKSRKFLPFLEMFDSDKKSYENRRETTECLDTIDRQKISSLLKEVYGKLQDIRNAFSHYHIDDQSVKHTALIISSEMHRFIENAYSFALQKTRARFTGVFVETDFLQAEEKGDNKKFFAIGGNEGIKLKDNALIFLICLFLDREEAFKFLSRATGFKSTKEKGFLAVRETFCALCCRQPHERLLSVNPREALLMDMLNELNRCPDILFEMLDEKDQKSFLPLLGEEEQAHILENSLNDELCEAIDDPFEMIASLSKRVRYKNRFPYLMLRYIEEKNLLPFIRFRIDLGCLELASYPKKMGEENNYERSVTDHAMAFGRLTDFHNEDAVLQQITKGITDEVRFSLYAPRYAIYNNKIGFVRTGGSDKISFPTLKKKGGEGHCVAYTLQNTKSFGFISIYDLRKILLLSFLDKDKAKNIVSGLLEQCEKHWKDLSENLFDAIRTELQKEFPVPLIRYTLPRSKGGKLVSSKLADKQEKYESEFERRKEKLTEILSEKDFDLSQIPRRMIDEWLNVLPTSREKKLKGYVETLKLDCRERLRVFEKREKGEHPVPPRIGEMATDLAKDIIRMVIDQGVKQRITSAYYSEIQRCLAQYAGDDNRRHLDSIIRELRLKDTKNGHPFLGKVLRPGLGHTEKLYQRYFEEKKEWLEATFYPAASPKRVPRFVNPPTGKQKELPLIIRNLMKERPEWRDWKQRKNSHPIDLPSQLFENEICRLLKDKIGKEPSGKLKWNEMFKLYWDKEFPNGMQRFYRCKRRVEVFDKVVEYEYSEEGGNYKKYYEALIDEVVRQKISSSKEKSKLQVEDLTLSVRRVFKRAINEKEYQLRLLCEDDRLLFMAVRDLYDWKEAQLDLDKIDNMLGEPVSVSQVIQLEGGQPDAVIKAECKLKDVSKLMRYCYDGRVKGLMPYFANHEATQEQVEMELRHYEDHRRRVFNWVFALEKSVLKNEKLRRFYEESQGGCEHRRCIDALRKASLVSEEEYEFLVHIRNKSAHNQFPDLEIGKLPPNVTSGFCECIWSKYKAIICRIIPFIDPERRFFGKLLEQK

SEQ ID NO: 99 - protein, 1135 aa, Porphymonas gingivalis
MNTVPASENKGQSRTVEDDPQYFGLYLNLARENLIEVESHVRIKFGKKKLNEESLKQSLLCDHLLSVDRWTKVYGHSRRYLPFLHYFDPDSQIEKDHDSKTGVDPDSAQRLIRELYSLLDFLRNDFSHNRLDGTTFEHLEVSPDISSFITGTYSLACGRAQSRFADFFKPDDFVLAKNRKEQLISVADGKECLTVSGLAFFICLFLDREQASGMLSRIRGFKRTDENWARAVHETFCDLCIRHPHDRLESSNTKEALLLDMLNELNRCPRILYDMLPEEERAQFLPALDENSMNNLSENSLNEESRLLWDGSSDWAEALTKRIRHQDRFPYLMLRFIEEMDLLKGIRFRVDLGEIELDSYSKKVGRNGEYDRTITDHALAFGKLSDFQNEEEVSRMISGEASYPVRFSLFAPRYAIYDNKIGYCHTSDPVYPKSKTGEKRALSNPRSMGFISVHDLRKLLLMELLCEGSFSRMQSDFLRKANRILDETAEGKLQFSALFPEMRHRFIPPQNPKSKDRREKAETTLEKYKQEIKGRKDKLNSQLLSAFDMDQRQLPSRLLDEWMNIRPASHSVKLRTYVKQLNEDCRLRLQKFRKDGDGKARAIPLVGEMATFLSQDIVRMIISEETKKLITSAYYNEMQRSLAQYAGEENRHQFRAIVAELRLLDPSSGHPFLSATMETAHRYTEDFYKCYLEKKREWLAKTFYRPEQDENTKRRISVFFVPDGEARKLLPLLIRRRMKEQNDLQDWIRNKQAHPIDLPSHLFDSKIMELLKVKDGKKKWNEAFKDWWSTKYPDGMQPFYGLRRELNIHGKSVSYIPSDGKKFADCYTHLMEKTVQDKKRELRTAGKPVPPDLAADIKRSFHRAVNEREFMLRLVQEDDRLMLMAINKMMTDREEDILPGLKNIDSILDEENQFSLAVHAKVLEKEGEGGDNSLSLVPATIEIKSKRKDWSKYIRYRYDRRVPGLMSHFPEHKATLDEVKTLLGEYDRCRIKIFDWAFALEGAIMSDRDLKPYLHESSSREGKSGEHSTLVKMLVEKKGCLTPDESQYLILIRNKAAHNQFPCAAEMPLIYRDVSAKVGSIEGSSAKDLPEGSSLVDSLWKKYEMIIRKILPILDPENRFFGKLLNNMSQPINDL

SEQ ID NO: 100 - protein, 1135 aa, Porphyromonas gingivalis
MNTVPASENKGQSRTVEDDPQYFGLYLNLARENLIEVESHVRIKFGKKKLNEESLKQSLLCDHLLSVDRWTKVYGHSRRYLPFLHYFDPDSQIEKDHDSKTGVDPDSAQRLIRELYSLLDFLRNDFSHNRLDGTTFEHLEVSPDISSFITGTYSLACGRAQSRFADFFKPDDFVLAKNRKEQLISVADGKECLTVSGLAFFICLFLDREQASGMLSRIRGFKRTDENWARAVHETFCDLCIRHPHDRLESSNTKEALLLDMLNELNRCPRILYDMLPEEERAQFLPALDENSMNNLSENSLNEESRLLWDGSSDWAEALTKRIRHQDRFPYLMLRFIEEMDLLKGIRFRVDLGEIELDSYSKKVGRNGEYDRTITDHALAFGKLSDFQNEEEVSRMISGEASYPVRFSLFAPRYAIYDNKIGYCHTSDPVYPKSKTGEKRALSNPQSMGFISVHDLRKLLLMELLCEGSFSRMQSGFLRKANRILDETAEGKLQFSALFPEMRHRFIPPQNPKSKDRREKAETTLEKYKQEIKGRKDKLNSQLLSAFDMNQRQLPSRLLDEWMNIRPASHSVKLRTYVKQLNEDCRLRLRKFRKDGDGKARAIPLVGEMATFLSQDIVRMIISEETKKLITSAYYNEMQRSLAQYAGEENRRQFRAIVAELHLLDPSSGHPFLSATMETAHRYTEDFYKCYLEKKREWLAKTFYRPEQDENTKRRISVFFVPDGEARKLLPLLIRRRMKEQNDLQDWIRNKQAHPIDLPSHLFDSKIMELLKVKDGKKKWNEAFKDWWSTKYPDGMQPFYGLRRELNIHGKSVSYIPSDGKKFADCYTHLMEKTVQDKKRELRTAGKPVPPDLAADIKRSFHRAVNEREFMLRLVQEDDRLMLMAINKMMTDREEDILPGLKNIDSILDEENQFSLAVHAKVLEKEGEGGDNSLSLVPATIEIKSKRKDWSKYIRYRYDRRVPGLMSHFPEHKATLDEVKTLLGEYDRCRIKIFDWAFALEGAIMSDRDLKPYLHESSSREGKSGEHSTLVKMLVEKKGCLTPDESQYLILIRNKAAHNQFPCAAEMPLIYRDVSAKVGSIEGSSAKDLPEGSSLVDSLWKKYEMIIRKILPILDHENRFFGKLLNNMSQPINDL

SEQ ID NO: 101 - protein, 1135 aa, Porphyromonas gingivalis
MNTVPASENKGQSRTVEDDPQYFGLYLNLARENLIEVESHVRIKFGKKKLNEESLKQSLLCDHLLSVDRWTKVYGHSRRYLPFLHYFDPDSQIEKDHDSKTGVDPDSAQRLIRELYSLLDFLRNDFSHNRLDGTTFEHLEVSPDISSFITGTYSLACGRAQSRFADFFKPDDFVLAKNRKEQLISVADGKECLTVSGLAFFICLFLDREQASGMLSRIRGFKRTDENWARAVHETFCDLCIRHPHDRLESSNTKEALLLDMLNELNRCPRILYDMLPEEERAQFLPALDENSMNNLSENSLNEESRLLWDGSSDWAEALTKRIRHQDRFPYLMLRFIEEMDLLKGIRFRVDLGEIELDSYSKKVGRNGEYDRTITDHALAFGKLSDFQNEEEVSRMISGEASYPVRFSLFAPRYAIYDNKIGYCHTSDPVYPKSKTGEKRALSNPRSMGFISVHDLRKLLLMELLCEGSFSRMQSDFLRKANRILDETAEGKLQFSALFPEMRHRFIPPQNPKSKDRREKAETTLEKYKQEIKGRKDKLNSQLLSAFDMDQRQLPSRLLDEWMNIRPASHSVKLRTYVKQLNEDCRLRLQKFRKDGDGKARAIPLVGEMATFLSQDIVRMIISEETKKLITSAYYNEMQRSLAQYAGEENRHQFRAIVAELRLLDPSSGHPFLSATMETAHRYTEDFYKCYLEKKREWLAKTFYRPEQDENTKRRISVFFVPDGEARKLLPLLIRRRMKEQNDLQDWIRNKQAHPIDLPSHLFDSKVMELLKVKDGKKKWNEAFKDWWSTKYPDGMQPFYGLRRELNIHGKSVSYIPSDGKKFADCYTHLMEKTVRDKKRELRTAGKPVPPDLAAYIKRSFHRAVNEREFMLRLVQEDDRLMLMAINKIMTDREEDILPGLKNIDSILDKENQFSLAVHAKVLEKEGEGGDNSLSLVPATIEIKSKRKDWSKYIRYRYDRRVPGLMSHFPEHKATLDEVKTLLGEYDRCRIKIFDWAFALEGAIMSDRDLKPYLHESSSREGKSGEHSTLVKMLVEKKGCLTPDESQYLILIRNKAAHNQFPCAAEIPLIYRDVSAKVGSIEGSSAKDLPEGSSLVDSLWKKYEMIIRKILPILDPENRFFGKLLNNMSQPINDL

SEQ ID NO: 102 - protein, 1125 aa, Prevotella intermedia
MKMEDDKKTTESTNMLDNKHFWAAFLNLARHNVYITVNHINKVLELKNKKDQDIIIDNDQDILAIKTHWEKVNGDLNKTERLRELMTKHFPFLETAIYTKNKEDKEEVKQEKQAEAQSLESLKDCLFLFLEKLQEARNYYSHYKYSESTKEPMLEEGLLEKMYNIFDDNIQLVIKDYQHNKDINPDEDFKHLDRKGQFKYSFADNEGNITESGLLFFVSLFLEKKDAIWMQQKLTGFKDNRESKKKMTHEVFCRRRMLLPKLRLESTQTQDWILLDMLNELIRCPKSLYERLQGEYRKKFNVPFDSADEDYDAEQEPFKNTLVRHQDRFPYFALRYFDYNEIFTNLRFQIDLGTYHFSIYKKLIGGQKEDRHLTHKLYGFERIQEFAKQNRPDEWKALVKDLDTYETSNERYISETTPHYHLENQKIGIRFRNGNKEIWPSLKTNGENNEKSKYKLDKPYQAEAFLSVHELLPMMFYYLLLKKEEPNNDKKNASIVEGFIKREIRDMYKLYDAFANGEINNIGDLEKYCEDKGIPKRHLPKQMVAILYDEPKDMVKEAKRKQKEMVKDTKKLLATLEKQTQEEIEDGGRNIRLLKSGEIARWLVNDMMRFQPVQKDNEGNPLNNSKANSTEYQMLQRSLALYNKEEKPTRYFRQVNLINSSNPHPFLKWTKWEECNNILSFYRNYLTKKIEFLNKLKPEDWEKNQYFLKLKEPKTNRETLVQGWKNGFNLPRGIFTEPIREWFKRHQNDSKEYEKVEALKRVGLVTKVIPLFFKEEYFKEDAQKEINNCVQPFYSFPYNVGNIHKPDEKDFLPSEERKKLWGDKKDKFKGYKAKVKSKKLTDKEKEEYRSYLEFQSWNKFERELRLVRNQDIVTWLLCTELIDKMKVEGLNVEELQKLRLKDIDTDTAKQEKNNILNRIMPMQLPVTVYEIDDSHNIVKDRPLHTVYIEETKTKLLKQGNFKALVKDRRLNGLFSFVDTSSKAELKDKPISKSVVEYELGEYQNARIETIKDMLLLEKTLIKKYEKLPTDNFSDMLNGWLEGKDESDKARFQNDVKLLVAVRNAFSHNQYPMRNRIAFANINPFSLSSADISEEKKLDIANQLKDKTHKIIKKIIEIEKPIETKE

SEQ ID NO: 103 - protein, 1161 aa, Bacteroides bacterium
MENQTQKGKGIYYYYTKNEDKHYFGSFLNLANNNIEQIIEEFRIRLSLKDEKNIKEIINNYFTDKKSYTDWERGINILKEYLPVIDYLDLAITDKEFEKIDLKQKETAKRKYFRTNFSLLIDTIIDLRNFYTHYFHKPISINPDVAKFLDKNLLNVCLDIKKQKMKTDKTKQALKDGLDKELKKLIELKKAELKEKKIKTWNITENVEGAVYNDAFNHMVYKNNAGVTILKDYHKSILPDDKIDSELKLNFSISGLVFLLSMFLSKKEIEQFKSNLEGFKGKVIGENGEYEISKFNNSLKYMATHWIFSYLTFKGLKQRVKNTFDKETLLMQMIDELNKVPHEVYQTLSKEQQNEFLEDINEYVQDNEENKKSMENSIVVHPVIRKRYDDKFNYFAIRFLDEFANFPTLKFFVTAGNFVHDKREKQIQGSMLTSDRMIKEKINVFGKLTEIAKYKSDYFSNENTLETSEWELFPNPSYLLIQNNIPVHIDLIHNTEEAKQCQIAIDRIKCTTNPAKKRNTRKSKEEIIKIIYQKNKNIKYGDPTALLSSNELPALIYELLVNKKSGKELENIIVEKIVNQYKTIAGFEKGQNLSNSLITKKLKKSEPNEDKINAEKIILAINRELEITENKLNIIKNNRAEFRTGAKRKHIFYSKELGQEATWIAYDLKRFMPEASRKEWKGFHHSELQKFLAFYDRNKNDAKALLNMFWNFDNDQLIGNDLNSAFREFHFDKFYEKYLIKRDEILEGFKSFISNFKDEPKLLKKGIKDIYRVFDKRYYIIKSTNAQKEQLLSKPICLPRGIFDNKPTYIEGVKVESNSALFADWYQYTYSDKHEFQSFYDMPRDYKEQFEKFELNNIKSIQNKKNLNKSDKFIYFRYKQDLKIKQIKSQDLFIKLMVDELFNVVFKNNIELNLKKLYQTSDERFKNQLIADVQKNREKGDTSDNKMNENFIWNMTIPLSLCNGQIEEPKVKLKDIGKFRKLETDDKVIQLLEYDKSKVWKKLEIEDELENMPNSYERIRREKLLKGIQEFEHFLLEKEKFDGINHPKHFEQDLNPNFKTYVINGVLRKNSKLNYTEIDKLLDLEHISIKDIETSAKEIHLAYFLIHVRNKFGHNQLPKLEAFELMKKYYKKNNEETYAEYFHKVSSQIVNEFKNSLEKHS

SEQ ID NO: 104 - protein, 1165 aa, Chryseobacterium jejuense
MEKTQTGLGIYYDHTKLQDKYFFGGFFNLAQNNIDNVIKAFIIKFFPERKDKDINIAQFLDICFKDNDADSDFQKKNKFLRIHFPVIGFLTSDNDKAGFKKKFALLLKTISELRNFYTHYYHKSIEFPSELFELLDDIFVKTTSEIKKLKKKDDKTQQLLNKNLSEEYDIRYQQQIERLKELKAQGKRVSLTDETAIRNGVFNAAFNHLIYRDGENVKPSRLYQSSYSEPDPAENGISLSQNSILFLLSMFLERKETEDLKSRVKGFKAKIIKQGEEQISGLKFMATHWVFSYLCFKGIKQKLSTEFHEETLLIQIIDELSKVPDEVYSAFDSKTKEKFLEDINEYMKEGNADLSLEDSKVIHPVIRKRYENKFNYFAIRFLDEYLSSTSLKFQVHVGNYVHDRRVKHINGTGFQTERIVKDRIKVFGRLSNISNLKADYIKEQLELPNDSNGWEIFPNPSYIFIDNNVPIHVLADEATKKGIELFKDKRRKEQPEELQKRKGKISKYNIVSMIYKEAKGKDKLRIDEPLALLSLNEIPALLYQILEKGATPKDIELIIKNKLTERFEKIKNYDPETPAPASQISKRLRNNTTAKGQEALNAEKLSLLIEREIENTETKLSSIEEKRLKAKKEQRRNTPQRSIFSNSDLGRIAAWLADDIKRFMPAEQRKNWKGYQHSQLQQSLAYFEKRPQEAFLLLKEGWDTSDGSSYWNNWVMNSFLENNHFEKFYKNYLMKRVKYFSELAGNIKQHTHNTKFLRKFIKQQMPADLFPKRHYILKDLETEKNKVLSKPLVFSRGLFDNNPTFIKGVKVTENPELFAEWYSYGYKTEHVFQHFYGWERDYNELLDSELQKGNSFAKNSIYYNRESQLDLIKLKQDLKIKKIKIQDLFLKRIAEKLFENVFNYPTTLSLDEFYLTQEERAEKERIALAQSLREEGDNSPNIIKDDFIWSKTIAFRSKQIYEPAIKLKDIGKFNRFVLDDEESKASKLLSYDKNKIWNKEQLERELSIGENSYEVIRREKLFKEIQNLELQILSNWSWDGINHPREFEMEDQKNTRHPNFKMYLVNGILRKNINLYKEDEDFWLESLKENDFKTLPSEVLETKSEMVQLLFLVILIRNQFAHNQLPEIQFYNFIRKNYPEIQNNTVAELYLNLIKLAVQKLKDNS

SEQ ID NO: 105 - protein, 1156 aa, Chryseobacterium carnipullorum
MNTRVTGMGVSYDHTKKEDKHFFGGFLNLAQDNITAVIKAFCIKFDKNPMSSVQFAESCFTDKDSDTDFQNKVRYVRTHLPVIGYLNYGGDRNTFRQKLSTLLKAVDSLRNFYTHYYHSPLALSTELFELLDTVFASVAVEVKQHKMKDDKTRQLLSKSLAEELDIRYKQQLERLKELKEQGKNIDLRDEAGIRNGVLNAAFNHLIYKEGEIAKPTLSYSSFYYGADSAENGITISQSGLLFLLSMFLGKKEIEDLKSRIRGFKAKIVRDGEENISGLKFMATHWIFSYLSFKGMKQRLSTDFHEETLLIQIIDELSKVPDEVYHDFDTATREKFVEDINEYIREGNEDFSLGDSTIIHPVIRKRYENKFNYFAVRFLDEFIKFPSLRFQVHLGNFVHDRRIKDIHGTGFQTERVVKDRIKVFGKLSEISSLKTEYIEKELDLDSDTGWEIFPNPSYVFIDNNIPIYISTNKTFKNGSSEFIKLRRKEKPEEMKMRGEDKKEKRDIASMIGNAGSLNSKTPLAMLSLNEMPALLYEILVKKTTPEEIELIIKEKLDSHFENIKNYDPEKPLPASQISKRLRNNTTDKGKKVINPEKLIHLINKEIDATEAKFALLAKNRKELKEKFRGKPLRQTIFSNMELGREATWLADDIKRFMPDILRKNWKGYQHNQLQQSLAFFNSRPKEAFTILQDGWDFADGSSFWNGWIINSFVKNRSFEYFYEAYFEGRKEYFSSLAENIKQHTSNHRNLRRFIDQQMPKGLFENRHYLLENLETEKNKILSKPLVFPRGLFDTKPTFIKGIKVDEQPELFAEWYQYGYSTEHVFQNFYGWERDYNDLLESELEKDNDFSKNSIHYSRTSQLELIKLKQDLKIKKIKIQDLFLKLIAGHIFENIFKYPASFSLDELYLTQEERLNKEQEALIQSQRKEGDHSDNIIKDNFIGSKTVTYESKQISEPNVKLKDIGKFNRFLLDDKVKTLLSYNEDKVWNKNDLDLELSIGENSYEVIRREKLFKKIQNFELQTLTDWPWNGTDHPEEFGTTDNKGVNHPNFKMYVVNGILRKHTDWFKEGEDNWLENLNETHFKNLSFQELETKSKSIQTAFLIIMIRNQFAHNQLPAVQFFEFIQKKYPEIQGSTTSELYLNFINLAVVELLELLEK

SEQ ID NO: 106 - protein, 1036 aa, Chryseobacterium ureilyticum
METQILGNGISYDHTKTEDKHFFGGFLNTAQNNIDLLIKAYISKFESSPRKLNSVQFPDVCFKKNDSDADFQHKLQFIRKHLPVIQYLKYGGNREVLKEKFRLLLQAVDSLRNFYTHFYHKPIQLPNELLTLLDTIFGEIGNEVRQNKMKDDKTRHLLKKNLSEELDFRYQEQLERLRKLKSEGKKVDLRDTEAIRNGVLNAAFNHLIFKDAEDFKPTVSYSSYYYDSDTAENGISISQSGLLFLLSMFLGRREMEDLKSRVRGFKARIIKHEEQHVSGLKFMATHWVFSEFCFKGIKTRLNADYHEETLLIQLIDELSKVPDELYRSFDVATRERFIEDINEYIRDGKEDKSLIESKIVHPVIRKRYESKFNYFAIRFLDEFVNFPTLRFQVHAGNYVHDRRIKSIEGTGFKTERLVKDRIKVFGKLSTISSLKAEYLAKAVNITDDTGWELLPHPSYVFIDNNIPIHLTVDPSFKNGVKEYQEKRKLQKPEEMKNRQGGDKMHKPAISSKIGKSKDINPESPVALLSMNEIPALLYEILVKKASPEEVEAKIRQKLTAVFERIRDYDPKVPLPASQVSKRLRNNTDTLSYNKEKLVELANKEVEQTERKLALITKNRRECREKVKGKFKRQKVFKNAELGTEATWLANDIKRFMPEEQKKNWKGYQHSQLQQSLAFFESRPGEARSLLQAGWDFSDGSSFWNGWVMNSFARDNTFDGFYESYLNGRMKYFLRLADNIAQQSSTNKLISNFIKQQMPKGLFDRRLYMLEDLATEKNKILSKPLIFPRGIFDDKPTFKKGVQVSEEPEAFADWYSYGYDVKHKFQEFYAWDRDYEELLREELEKDTAFTKNSIHYSRESQIELLAKKQDLKVKKVRIQDLYLKLMAEFLFENVFGHELALPLDQFYLTQEERLKQEQEAIVQSQRPKGDDSPNIVKENFIWSKTIPFKSGRVFEPNVKLKDIGKFRNLLTDEKVDILLSYNNTEIGKQVIENELIIGAGSYEFIRREQLFKEIQQMKRLSLRSVRGMGVPIRLNLK

SEQ ID NO: 107 - protein, 1127 aa, Prevotella buccae
MQKQDKLFVDRKKNAIFAFPKYITIMENQEKPEPIYYELTDKHFWAAFLNLARHNVYTTINHINRRLEIAELKDDGYMMDIKGSWNEQAKKLDKKVRLRDLIMKHFPFLEAAAYEITNSKSPNNKEQREKEQSEALSLNNLKNVLFIFLEKLQVLRNYYSHYKYSEESPKPIFETSLLKNMYKVFDANVRLVKRDYMHHENIDMQRDFTHLNRKKQVGRTKNIIDSPNFHYHFADKEGNMTIAGLLFFVSLFLDKKDAIWMQKKLKGFKDGRNLREQMTNEVFCRSRISLPKLKLENVQTKDWMQLDMLNELVRCPKSLYERLREKDRESFKVPFDIFSDDYDAEEEPFKNTLVRHQDRFPYFVLRYFDLNEIFEQLRFQIDLGTYHFSIYNKRIGDEDEVRHLTHHLYGFARIQDFAQQNQPEVWRKLVKDLDYFEASQEPYIPKTAPHYHLENEKIGIKFCSTHNNLFPSLKTEKTCNGRSKFNLGTQFTAEAFLSVHELLPMMFYYLLLTKDYSRKESADKVEGIIRKEISNIYAIYDAFANGEINSIADLTCRLQKTNILQGHLPKQMISILEGRQKDMEKEAERKIGEMIDDTQRRLDLLCKQTNQKIRIGKRNAGLLKSGKIADWLVNDMMRFQPVQKDQNNIPINNSKANSTEYRMLQRALALFGSENFRLKAYFNQMNLVGNDNPHPFLAETQWEHQTNILSFYRNYLEARKKYLKGLKPQNWKQYQHFLILKVQKTNRNTLVTGWKNSFNLPRGIFTQPIREWFEKHNNSKRIYDQILSFDRVGFVAKAIPLYFAEEYKDNVQPFYDYPFNIGNKLKPQKGQFLDKKERVELWQKNKELFKNYPSEKKKTDLAYLDFLSWKKFERELRLIKNQDIVTWLMFKELFNMATVEGLKIGEIHLRDIDTNTANEESNNILNRIMPMKLPVKTYETDNKGNILKERPLATFYIEETETKVLKQGNFKVLAKDRRLNGLLSFAETTDIDLEKNPITKLSVDHELIKYQTTRISIFEMTLGLEKKLINKYPTLPTDSFRNMLERWLQCKANRPELKNYVNSLIAVRNAFSHNQYPMYDATLFAEVKKFTLFPSVDTKKIELNIAPQLLEIVGKAIKEIEKSENKN

SEQ ID NO: 108 - protein, 1135 aa, Porphyromonas gingivalis
MNTVPASENKGQSRTVEDDPQYFGLYLNLARENLIEVESHVRIKFGKKKLNEESLKQSLLCDHLLSVDRWTKVYGHSRRYLPFLHYFDPDSQIEKDHDSKTGVDPDSAQRLIRELYSLLDFLRNDFSHNRLDGTTFEHLEVSPDISSFITGTYSLACGRAQSRFADFFKPDDFVLAKNRKEQLISVADGKECLTVSGLAFFICLFLDREQASGMLSRIRGFKRTDENWARAVHETFCDLCIRHPHDRLESSNTKEALLLDMLNELNRCPRILYDMLPEEERAQFLPALDENSMNNLSENSLNEESRLLWDGSSDWAEALTKRIRHQDRFPYLMLRFIEEMDLLKGIRFRVDLGEIELDSYSKKVGRNGEYDRTITDHALAFGKLSDFQNEEEVSRMISGEASYPVRFSLFAPRYAIYDNKIGYCHTSDPVYPKSKTGEKRALSNPQSMGFISVHNLRKLLLMELLCEGSFSRMQSDFLRKANRILDETAEGKLQFSALFPEMRHRFIPPQNPKSKDRREKAETTLEKYKQEIKGRKDKLNSQLLSAFDMNQRQLPSRLLDEWMNIRPASHSVKLRTYVKQLNEDCRLRLRKFRKDGDGKARAIPLVGEMATFLSQDIVRMIISEETKKLITSAYYNEMQRSLAQYAGEENRRQFRAIVAELHLLDPSSGHPFLSATMETAHRYTEDFYKCYLEKKREWLAKTFYRPEQDENTKRRISVFFVPDGEARKLLPLLIRRRMKEQNDLQDWIRNKQAHPIDLPSHLFDSKIMELLKVKDGKKKWNEAFKDWWSTKYPDGMQPFYGLRRELNIHGKSVSYIPSDGKKFADCYTHLMEKTVQDKKRELRTAGKPVPPDLAADIKRSFHRAVNEREFMLRLVQEDDRLMLMAINKMMTDREEDILPGLKNIDSILDEENQFSLAVHAKVLEKEGEGGDNSLSLVPATIEIKSKRKDWSKYIRYRYDRRVPGLMSHFPEHKATLDEVKTLLGEYDRCRIKIFDWAFALEGAIMSDRDLKPYLHESSSREGKSGEHSTLVKMLVEKKGCLTPDESQYLILIRNKAAHNQFPCAAEMPLIYRDVSAKVGSIEGSSAKDLPEGSSLVDSLWKKYEMIIRKILPILDPENRFFGKLLNNMSQPINDL

SEQ ID NO: 109 - protein, 1175 aa, Porphyromonas gingivalis
MTEQNEKPYNGTYYTLEDKHFWAAFFNLARHNAYITLAHIDRQLAYSKADITNDEDILFFKGQWKNLDNDLERKARLRSLILKHFSFLEGAAYGKKLFESQSSGNKSSKKKELTKKEKEELQANALSLDNLKSILFDFLQKLKDFRNYYSHYRHPESSELPLFDGNMLQRLYNVFDVSVQRVKRDHEHNDKVDPHRHFNHLVRKGKKDKYGNNDNPFFKHHFVDREEKVTEAGLLFFVSLFLEKRDAIWMQKKIRGFKGGTEAYQQMTNEVFCRSRISLPKLKLESLRTDDWMLLDMLNELVRCPKSLYDRLREEDRARFRVPVDILSDEDDTDGTEEDPFKNTLVRHQDRFPYFALRYFDLKKVFTSLRFHIDLGTYHFAIYKKNIGEQPEDRHLTRNLYGFGRIQDFAEEHRPEEWKRLVRDLDYFETGDKPYITQTTPHYHIEKGKIGLRFVPEGQLLWPSPEVGATRTGRSKYAQDKRFTAEAFLSVHELMPMMFYYFLLREKYSEEASAEKVQGRIKRVIEDVYAVYDAFARDEINTRDELDACLADKGIRRGHLPRQMIAILSQEHKDMEEKVRKKLQEMIADTDHRLDMLDRQTDRKIRIGRKNAGLPKSGVIADWLVRDMMRFQPVAKDTSGKPLNNSKANSTEYRMLQRALALFGGEKERLTPYFRQMNLTGGNNPHPFLHETRWESHTNILSFYRSYLKARKAFLQSIGRSDREENHRFLLLKEPKTDRQTLVAGWKSEFHLPRGIFTEAVRDCLIEMGYDEVGSYKEVGFMAKAVPLYFERACKDRVQPFYDYPFNVGNSLKPKKGRFLSKEKRAEEWESGKERFRDLEAWSHSAARRIEDAFVGIEYASWENKKKIEQLLQDLSLWETFESKLKVKADKINIAKLKKEILEAKEHPYHDFKSWQKFERELRLVKNQDIITWMMCRDLMEENKVEGLDTGTLYLKDIRTDVQEQGSLNVLNHVKPMRLPVVVYRADSRGHVHKEEAPLATVYIEERDTKLLKQGNFKSFVKDRRLNGLFSFVDTGALAMEQYPISKLRVEYELAKYQTARVCAFEQTLELEESLLTRYPHLPDESFREMLESWSDPLLDKWPDLQREVRLLIAVRNAFSHNQYPMYDETIFSSIRKYDPSSLDAIEERMGLNIAHRLSEEVKLAKEMVERIIQA

SEQ ID NO: 110 - protein, 1125 aa, Prevotella pallens; identical to SEQ ID NO: 92

SEQ ID NO: 111 - protein, 1157 aa, Myoides odoratimum; identical to SEQ ID NO: 93

SEQ ID NO: 112 - protein, 1157 aa, Myroides odoratimum; identical to SEQ ID NO: 94

SEQ ID NO: 113 - protein, 1127 aa, Prevotella sp.
MQKQDKLFVDRKKNAIFAFPKYITIMENQEKPEPIYYELTDKHFWAAFLNLARHNVYTTINHINRRLEIAELKDDGYMMGIKGSWNEQAKKLDKKVRLRDLIMKHFPFLEAAAYEITNSKSPNNKEQREKEQSEALSLNNLKNVLFIFLEKLQVLRNYYSHYKYSEESPKPIFETSLLKNMYKVFDANVRLVKRDYMHHENIDMQRDFTHLNRKKQVGRTKNIIDSPNFHYHFADKEGNMTIAGLLFFVSLFLDKKDAIWMQKKLKGFKDGRNLREQMTNEVFCRSRISLPKLKLENVQTKDWMQLDMLNELVRCPKSLYERLREKDRESFKVPFDIFSDDYDAEEEPFKNTLVRHQDRFPYFVLRYFDLNEIFEQLRFQIDLGTYHFSIYNKRIGDEDEVRHLTHHLYGFARIQDFAPQNQPEEWRKLVKDLDHFETSQEPYISKTAPHYHLENEKIGIKFCSTHNNLFPSLKREKTCNGRSKFNLGTQFTAEAFLSVHELLPMMFYYLLLTKDYSRKESADKVEGIIRKEISNIYAIYDAFANNEINSIADLTCRLQKTNILQGHLPKQMISILEGRQKDMEKEAERKIGEMIDDTQRRLDLLCKQTNQKIRIGKRNAGLLKSGKIADWLVSDMMRFQPVQKDTNNAPINNSKANSTEYRMLQHALALFGSESSRLKAYFRQMNLVGNANPHPFLAETQWEHQTNILSFYRNYLEARKKYLKGLKPQNWKQYQHFLILKVQKTNRNTLVTGWKNSFNLPRGIFTQPIREWFEKHNNSKRIYDQILSFDRVGFVAKAIPLYFAEEYKDNVQPFYDYPFNIGNKLKPQKGQFLDKKERVELWQKNKELFKNYPSEKNKTDLAYLDFLSWKKFERELRLIKNQDIVTWLMFKELFKTTTVEGLKIGEIHLRDIDTNTANEESNNILNRIMPMKLPVKTYETDNKGNILKERPLATFYIEETETKVLKQGNFKVLAKDRRLNGLLSFAETTDIDLEKNPITKLSVDYELIKYQTTRISIFEMTLGLEKKLIDKYSTLPTDSFRNMLERWLQCKANRPELKNYVNSLIAVRNAFSHNQYPMYDATLFAEVKKFTLFPSVDTKKIELNIAPQLLEIVGKAIKEIEKSENKN

SEQ ID NO: 114 - protein, 1119 aa, Porphyromonas gingivalis
MTEQNERPYNGTYYTLEDKHFWAAFFNLARHNAYITLAHIDRQLAYSKADITNDEDILFFKGQWKNLDNDLERKARLRSLILKHFSFLEGAAYGKKLFESQSSGNKSSKKKELTKKEKEELQANALSLDNLKSILFDFLQKLKDFRNYYSHYRHPESSELPLFDGNMLQRLYNVFDVSVQRVKRDHEHNDKVDPHRHFNHLVRKGKKDRYGNNDNPFFKHHFVDREEKVTEAGLLFFVSLFLEKRDAIWMQKKIRGFKGGTETYQQMTNEVFCRSRISLPKLKLESLRTDDWMLLDMLNELVRCPKSLYDRLREEDRARFRVPVDILSDEDDTDGTEEDPFKNTLVRHQDRFPYFALRYFDLKKVFTSLRFHIDLGTYHFAIYKKNIGEQPEDRHLTRNLYGFGRIQDFAEEHRPEEWKRLVRDLDYFETGDKPYITQTTPHYHIEKGKIGLRFVPEGQHLWPSPEVGATRTGRSKYAQDKRLTAEAFLSVHELMPMMFYYFLLREKYSDEASAERVQGRIKRVIEDVYAVYDAFARGEINTRDELDACLADKGIRRGHLPRQMIGILSQEHKDMEEKVRKKLQEMIVDTDHRLDMLDRQTDRKIRIGRKNAGLPKSGVIADWLVRDMMRFQPVAKDTSGKPLNNSKANSTEYRMLQRALALFGGEKERLTPYFRQMNLTGGNNPHPFLHETRWESHTNILSFYRSYLKARKAFLQSIGRSDRVENHRFLLLKEPKTDRQTLVAGWKGEFHLPRGIFTEAVRDCLIEMGLDEVGSYKEVGFMAKAVPLYFERACKDRVQPFYDYPFNVGNSLKPKKGRFLSKEKRAEEWESGKERFRLAKLKKEILEAKEHPYLDFKSWQKFERELRLVKNQDIITWMICRDLMEENKVEGLDTGTLYLKDIRTDVQEQGNLNVLNRVKPMRLPVVVYRADSRGHVHKEQAPLATVYIEERDTKLLKQGNFKSFVKDRRLNGLFSFVDTGALAMEQYPISKLRVEYELAKYQTARVCAFEQTLELEESLLTRYPHLPDKNFRKMLESWSDPLLDKWPDLHGNVRLLIAVRNAFSHNQYPMYDEAVFSSIRKYDPSSPDAIEERMGLNIAHRLSEEVKQAKEMAERIIQA

SEQ ID NO: 115 - protein, 1154 aa, Paludibacter propionicigenes
MKTSANNIYFNGINSFKKIFDSKGAIAPIAEKSCRNFDIKAQNDVNKEQRIHYFAVGHTFKQLDTENLFEYVLDENLRAKRPTRFISLQQFDKEFIENIKRLISDIRNINSHYIHRFDPLKIDAVPTNIIDFLKESFELAVIQIYLKEKGINYLQFSENPHADQKLVAFLHDKFLPLDEKKTSMLQNETPQLKEYKEYRKYFKTLSKQAAIDQLLFAEKETDYIWNLFDSHPVLTISAGKYLSFYSCLFLLSMFLYKSEANQLISKIKGFKKNTTEEEKSKREIFTFFSKRFNSMDIDSEENQLVKFRDLILYLNHYPVAWNKDLELDSSNPAMTDKLKSKIIELEINRSFPLYEGNERFATFAKYQIWGKKHLGKSIEKEYINASFTDEEITAYTYETDTCPELKDAHKKLADLKAAKGLFGKRKEKNESDIKKTETSIRELQHEPNPIKDKLIQRIEKNLLTVSYGRNQDRFMDFSARFLAEINYFGQDASFKMYHFYATDEQNSELEKYELPKDKKKYDSLKFHQGKLVHFISYKEHLKRYESWDDAFVIENNAIQLKLSFDGVENTVTIQRALLIYLLEDALRNIQNNTAENAGKQLLQEYYSHNKADLSAFKQILTQQDSIEPQQKTEFKKLLPRRLLNNYSPAINHLQTPHSSLPLILEKALLAEKRYCSLVVKAKAEGNYDDFIKRNKGKQFKLQFIRKAWNLMYFRNSYLQNVQAAGHHKSFHIERDEFNDFSRYMFAFEELSQYKYYLNEMFEKKGFFENNEFKILFQSGTSLENLYEKTKQKFEIWLASNTAKTNKPDNYHLNNYEQQFSNQLFFINLSHFINYLKSTGKLQTDANGQIIYEALNNVQYLIPEYYYTDKPERSESKSGNKLYNKLKATKLEDALLYEMAMCYLKADKQIADKAKHPITKLLTSDVEFNITNKEGIQLYHLLVPFKKIDAFIGLKMHKEQQDKKHPTSFLANIVNYLELVKNDKDIRKTYEAFSTNPVKRTLTYDDLAKIDGHLISKSIKFTNVTLELERYFIFKESLIVKKGNNIDFKYIKGLRNYYNNEKKKNEGIRNKAFHFGIPDSKSYDQLIRDAEVMFIANEVKPTHATKYTDLNKQLHTVCDKLMETVHNDYFSKEGDGKKKREAAGQKYFENIISAK

SEQ ID NO: 116 - protein, 1119 aa, Porphyromonas gingivalis
MTEQNEKPYNGTYYTLEDKHFWAAFFNLARHNAYITLAHIDRQLAYSKADITNDEDILFFKGQWKNLDNDLERKARLRSLILKHFSFLEGAAYGKKLFESQSSGNKSSKNKELTKKEKEELQANALSLDNLKSILFDFLQKLKDFRNYYSHYRHPESSELPLFDGNMLQRLYNVFDVSVQRVKRDHEHNDKVDPHRHFNHLVRKGKKDRYGNNDNPFFKHHFVDREGTVTEAGLLFFVSLFLEKRDAIWMQKKIRGFKGGTETYQQMTNEVFCRSRISLPKLKLESLRTDDWMLLDMLNELVRCPKSLYDRLREEDRARFRVPVDILSDEEDTDGAEEDPFKNTLVRHQDRFPYFALRYFDLKKVFTSLRFQIDLGTYHFAIYKKNIGEQPEDRHLTRNLYGFGRIQDFAEEHRPEEWKRLVRDLDYFETGDKPYITQTTPHYHIEKGKIGLRFVPEGQHLWPSPEVGATRTGRSKYAQDKRFTAEAFLSAHELMPMMFYYFLLREKYSEEASAERVQGRIKRVIEDVYAVYDAFARDEINTRDELDACLADKGIRRGHLPRQMIGILSQEHKDMEEKIRKKLQEMMADTDHRLDMLDRQTDRKIRIGRKNAGLPKSGVIADWLVRDMMRFQPVAKDTSGKPLNNSKANSTEYRMLQRALALFGGEKERLTPYFRQMNLTGGNNPHPFLHETRWESHTNILSFYRSYLKARKAFLQSIGRSDRVENHRFLLLKEPKTDRQTLVAGWKGEFHLPRGIFTEAVRDCLIEMGLDEVGSYKEVGFMAKAVPLYFERACKDWVQPFYNYPFNVGNSLKPKKGRFLSKEKRAEEWESGKERFRLAKLKKEILEAKEHPYLDFKSWQKFERELRLVKNQDIITWMICGDLMEENKVEGLDTGTLYLKDIRTDVQEQGSLNVLNRVKPMRLPVVVYRADSRGHVHKEQAPLATVYIEERDTKLLKQGNFKSFVKDRRLNGLFSFVDTGALAMEQYPISKLRVEYELAKYQTARVCAFEQTLELEESLLTRCPHLPDKNFRKMLESWSDPLLDKWPDLHRKVRLLIAVRNAFSHNQYPMYDEAVFSSIRKYDPSFPDAIEERMGLNIAHRLSEEVKQAKETVERIIQA

SEQ ID NO: 117 - protein, 1179 aa, Flavobacterium columnare
MSSKNESYNKQKTFNHYKQEDKYFFGGFLNNADDNLRQVGKEFKTRINFNHNNNELASVFKDYFNKEKSVAKREHALNLLSNYFPVLERIQKHTNHNFEQTREIFELLLDTIKKLRDYYTHHYHKPITINPKIYDFLDDTLLDVLITIKKKKVKNDTSRELLKEKLRPELTQLKNQKREELIKKGKKLLEENLENAVFNHCLRPFLEENKTDDKQNKTVSLRKYRKSKPNEETSITLTQSGLVFLMSFFLHRKEFQVFTSGLEGFKAKVNTIKEEEISLNKNNIVYMITHWSYSYYNFKGLKHRIKTDQGVSTLEQNNTTHSLTNTNTKEALLTQIVDYLSKVPNEIYETLSEKQQKEFEEDINEYMRENPENEDSTFSSIVSHKVIRKRYENKFNYFAMRFLDEYAELPTLRFMVNFGDYIKDRQKKILESIQFDSERIIKKEIHLFEKLSLVTEYKKNVYLKETSNIDLSRFPLFPNPSYVMANNNIPFYIDSRSNNLDEYLNQKKKAQSQNKKRNLTFEKYNKEQSKDAIIAMLQKEIGVKDLQQRSTIGLLSCNELPSMLYEVIVKDIKGAELENKIAQKIREQYQSIRDFTLDSPQKDNIPTTLIKTINTDSSVTFENQPIDIPRLKNAIQKELTLTQEKLLNVKEHEIEVDNYNRNKNTYKFKNQPKNKVDDKKLQRKYVFYRNEIRQEANWLASDLIHFMKNKSLWKGYMHNELQSFLAFFEDKKNDCIALLETVFNLKEDCILTKGLKNLFLKHGNFIDFYKEYLKLKEDFLNTESTFLENGLIGLPPKILKKELSKRFKYIFIVFQKRQFIIKELEEKKNNLYADAINLSRGIFDEKPTMIPFKKPNPDEFASWFVASYQYNNYQSFYELTPDIVERDKKKKYKNLRAINKVKIQDYYLKLMVDTLYQDLFNQPLDKSLSDFYVSKAEREKIKADAKAYQKRNDSSLWNKVIHLSLQNNRITANPKLKDIGKYKRALQDEKIATLLTYDDRTWTYALQKPEKENENDYKELHYTALNMELQEYEKVRSKELLKQVQELEKQILEEYTDFLSTQIHPADFEREGNPNFKKYLAHSILENEDDLDKLPEKVEAMRELDETITNPIIKKAIVLIIIRNKMAHNQYPPKFIYDLANRFVPKKEEEYFATYFNRVFETITKELWENKEKKDKTQV

SEQ ID NO: 118 - protein, 1145 aa, Psychroflexus torquis
MESIIGLGLSFNPYKTADKHYFGSFLNLVENNLNAVFAEFKERISYKAKDENISSLIEKHFIDNMSIVDYEKKISILNGYLPIIDFLDDELENNLNTRVKNFKKNFIILAEAIEKLRDYYTHFYHDPITFEDNKEPLLELLDEVLLKTILDVKKKYLKTDKTKEILKDSLREEMDLLVIRKTDELREKKKTNPKIQHTDSSQIKNSIFNDAFQGLLYEDKGNNKKTQVSHRAKTRLNPKDIHKQEERDFEIPLSTSGLVFLMSLFLSKKEIEDFKSNIKGFKGKVVKDENHNSLKYMATHRVYSILAFKGLKYRIKTDTFSKETLMMQMIDELSKVPDCVYQNLSETKQKDFIEDWNEYFKDNEENTENLENSRVVHPVIRKRYEDKFNYFAIRFLDEFANFKTLKFQVFMGYYIHDQRTKTIGTTNITTERTVKEKINVFGKLSKMDNLKKHFFSQLSDDENTDWEFFPNPSYNFLTQADNSPANNIPIYLELKNQQIIKEKDAIKAEVNQTQNRNPNKPSKRDLLNKILKTYEDFHQGDPTAILSLNEIPALLHLFLVKPNNKTGQQIENIIRIKIEKQFKAINHPSKNNKGIPKSLFADTNVRVNAIKLKKDLEAELDMLNKKHIAFKENQKASSNYDKLLKEHQFTPKNKRPELRKYVFYKSEKGEEATWLANDIKRFMPKDFKTKWKGCQHSELQRKLAFYDRHTKQDIKELLSGCEFDHSLLDINAYFQKDNFEDFFSKYLENRIETLEGVLKKLHDFKNEPTPLKGVFKNCFKFLKRQNYVTESPEIIKKRILAKPTFLPRGVFDERPTMKKGKNPLKDKNEFAEWFVEYLENKDYQKFYNAEEYRMRDADFKKNAVIKKQKLKDFYTLQMVNYLLKEVFGKDEMNLQLSELFQTRQERLKLQGIAKKQMNKETGDSSENTRNQTYIWNKDVPVSFFNGKVTIDKVKLKNIGKYKRYERDERVKTFIGYEVDEKWMMYLPHNWKDRYSVKPINVIDLQIQEYEEIRSHELLKEIQNLEQYIYDHTTDKNILLQDGNPNFKMYVLNGLLIGIKQVNIPDFIVLKQNTNFDKIDFTGIASCSELEKKTIILIAIRNKFAHNQLPNKMIYDLANEFLKIEKNETYANYYLKVLKKMISDLA

SEQ ID NO: 119 - protein, 948 aa, Riemerella anatipestifer
MFFSFHNAQRVIFKHLYKAFDASLRMVKEDYKAHFTVNLTRDFAHLNRKGKNKQDNPDFNRYRFEKDGFFTESGLLFFTNLFLDKRDAYWMLKKVSGFKASHKQREKMTTEVFCRSRILLPKLRLESRYDHNQMLLDMLSELSRCPKLLYEKLSEENKKHFQVEADGFLDEIEEEQNPFKDTLIRHQDRFPYFALRYLDLNESFKSIRFQVDLGTYHYCIYDKKIGDEQEKRHLTRTLLSFGRLQDFTEINRPQEWKALTKDLDYKETSNQPFISKTTPHYHITDNKIGFRLGTSKELYPSLEIKDGANRIAKYPYNSGFVAHAFISVHELLPLMFYQHLTGKSEDLLKETVRHIQRIYKDFEEERINTIEDLEKANQGRLPLGAFPKQMLGLLQNKQPDLSEKAKIKIEKLIAETKLLSHRLNTKLKSSPKLGKRREKLIKTGVLADWLVKDFMRFQPVAYDAQNQPIKSSKANSTEFWFIRRALALYGGEKNRLEGYFKQTNLIGNTNPHPFLNKFNWKACRNLVDFYQQYLEQREKFLEAIKHQPWEPYQYCLLLKVPKENRKNLVKGWEQGGISLPRGLFTEAIRETLSKDLTLSKPIRKEIKKHGRVGFISRAITLYFKEKYQDKHQSFYNLSYKLEAKAPLLKKEEHYEYWQQNKPQSPTESQRLELHTSDRWKDYLLYKRWQHLEKKLRLYRNQDIMLWLMTLELTKNHFKELNLNYHQLKLENLAVNVQEADAKLNPLNQTLPMVLPVKVYPTTAFGEVQYHETPIRTVYIREEQTKALKMGNFKALVKDRRLNGLFSFIKEENDTQKHPISQLRLRRELEIYQSLRVDAFKETLSLEEKLLNKHASLSSLENEFRTLLEEWKKKYAASSMVTDKHIAFIASVRNAFCHNQYPFYKETLHAPILLFTVAQPTTEEKDGLGIAEALLKVLREYCEIVKSQI

SEQ ID NO: 120 - protein, 1139 aa, Prevotella pleuritidis
MENDKRLEESACYTLNDKHFWAAFLNLARHNVYITVNHINKTLELKNKKNQEIIIDNDQDILAIKTHWAKVNGDLNKTDRLRELMIKHFPFLEAAIYSNNKEDKEEVKEEKQAKAQSFKSLKDCLFLFLEKLQEARNYYSHYKYSESSKEPEFEEGLLEKMYNTFDASIRLVKEDYQYNKDIDPEKDFKHLERKEDFNYLFTDKDNKGKITKNGLLFFVSLFLEKKDAIWMQQKFRGFKDNRGNKEKMTHEVFCRSRMLLPKIRLESTQTQDWILLDMLNELIRCPKSLYERLQGAYREKFKVPFDSIDEDYDAEQEPFRNTLVRHQDRFPYFALRYFDYNEIFKNLRFQIDLGTYHFSIYKKLIGGKKEDRHLTHKLYGFERIQEFTKQNRPDKWQAIIKDLDTYETSNERYISETTPHYHLENQKIGIRFRNDNNDIWPSLKTNGEKNEKSKYNLDKPYQAEAFLSVHELLPMMFYYLLLKMENTDNDKEDNEVGTKKKGNKNNKQEKHKIEEIIENKIKDIYALYDAFTNGEINSIDELAEQREGKDIEIGHLPKQLIVILKNKSKDMAEKANRKQKEMIKDTKKRLATLDKQVKGEIEDGGRNIRLLKSGEIARWLVNDMMRFQPVQKDNEGKPLNNSKANSTEYQMLQRSLALYNKEEKPTRYFRQVNLIKSSNPHPFLEDTKWEECYNILSFYRNYLKAKIKFLNKLKPEDWKKNQYFLMLKEPKTNRKTLVQGWKNGFNLPRGIFTEPIKEWFKRHQNDSEEYKKVEALDRVGLVAKVIPLFFKEEYFKEDAQKEINNCVQPFYSFPYNVGNIHKPEEKNFLHCEERRKLWDKKKDKFKGYKAKEKSKKMTDKEKEEHRSYLEFQSWNKFERELRLVRNQDILTWLLCTKLIDKLKIDELNIEELQKLRLKDIDTDTAKKEKNNILNRVMPMRLPVTVYEIDKSFNIVKDKPLHTVYIEETGTKLLKQGNFKALVKDRRLNGLFSFVKTSSEAESKSKPISKLRVEYELGAYQKARIDIIKDMLALEKTLIDNDENLPTNKFSDMLKSWLKGKGEANKARLQNDVGLLVAVRNAFSHNQYPMYNSEVFKGMKLLSLSSDIPEKEGLGIAKQLKDKIKETIERIIEIEKEIRN

SEQ ID NO: 121 - protein, 1135 aa, Porphyromonas gingivalis; identical to SEQ ID NO: 99

SEQ ID NO: 122 - protein, 1135 aa, Porphyromonas gingivalis
MNTVPASENKGQSRTVEDDPQYFGLYLNLARENLIEVESHVRIKFGKKKLNEESLKQSLLCDHLLSVDRWTKVYGHSRRYLPFLHYFDPDSQIEKDHDSKTGVDPDSAQRLIRELYSLLDFLRNDFSHNRLDGTTFEHLEVSPDISSFITGTYSLACGRAQSRFADFFKPDDFVLAKNRKEQLISVADGKECLTVSGLAFFICLFLDREQASGMLSRIRGFKRTNENWARAVHETFCDLCIRHPHDRLESSNTKEALLLDMLNELNRCPRILYDMLPEEERAQFLPALDENSMNNLSENSLNEESRLLWDGSSDWAEALTKRIRHQDRFPYLMLRFIEEMDLLKGIRFRVDLGEIELDSYSKKVGRNGEYDRTITDHALAFGKLSDFQNEEEVSRMISGEASYPVRFSLFAPRYAIYDNKIGYCHTSDPVYPKSKTGEKRALSNPQSMGFISVHDLRKLLLMELLCEGSFSRMQSGFLRKANRILDETAEGKLQFSALFPEMRHRFIPPQNPKSKDRREKAETTLEKYKQEIKGRKDKLNSQLLSAFDMNQRQLPSRLLDEWMNIRPASHSVKLRTYVKQLNEDCRLRLRKFRKDGDGKARAIPLVGEMATFLSQDIVRMIISEETKKLITSAYYNEMQRSLAQYAGEENRRQFRAIVAELHLLDPSSGHPFLSATMETAHRYTEDFYKCYLEKKREWLAKTFYRPEQDENTKRRISVFFVPDGEARKLLPLLIRRRMKEQNDLQDWIRNKQAHPIDLPSHLFDSKIMELLKVKDGKKKWNEAFKDWWSTKYPDGMQPFYGLRRELNIHGKSVSYIPSDGKKFADCYTHLMEKTVQDKKRELRTAGKPVPPDLAADIKRSFHRAVNEREFMLRLVQEDDRLMLMAINKMMTDREEDILPGLKNIDSILDKENQFSLAVHAKVLEKEGEGGDNSLSLVPATIEIKSKRKDWSKYIRYRYDRRVPGLMSHFPEHKATLDEVKTLLGEYDRCRIKIFDWAFALEGAIMSDRDLKPYLHESSSREGKSGEHSTLVKMLVEKKGCLTPDESQYLILIRNKAAHNQFPCAAEMPLIYRDVSAKVGSIEGSSAKDLPEGSSLVDSLWKKYEMIIRKILPILDHENRFFGKLLNNMSQPINDL

SEQ ID NO: 123 - protein, 1135 aa, Porphyromonas gingivalis; identical to SEQ ID NO: 100

SEQ ID NO: 124 - protein, 1135 aa, Porphyromonas gingivalis; identical to SEQ ID NO: 101

SEQ ID NO: 125 - protein, 1135 aa, Porphyromonas gingivalis
MNTVPASENKGQSRTVEDDPQYFGLYLNLARENLIEVESHVRIKFGKKKLNEESLKQSLLCDHLLSVDRWTKVYGHSRRYLPFLHYFDPDSQIEKDHDSKTGVDPDSAQRLIRELYSLLDFLRNDFSHNRLDGTTFEHLEVSPDISSFITGTYSLACGRAQSRFADFFKPDDFVLAKNRKEQLISVADGKECLTVSGLAFFICLFLDREQASGMLSRIRGFKRTDENWARAVHETFCDLCIRHPHDRLESSNTKEALLLDMLNELNRCPRILYDMLPEEERAQFLPALDENSMNNLSENSLNEESRLLWDGSSDWAEALTKRIRHQDRFPYLMLRFIEEMDLLKGIRFRVDLGEIELDSYSKKVGRNGEYDRTITDHALAFGKLSDFQNEEEVSRMISGEASYPVRFSLFAPRYAIYDNKIGYCHTSDPVYPKSKTGEKRALSNPRSMGFISVHDLRKLLLMELLCEGSFSRMQSDFLRKANRILDETAEGKLQFSALFPEMRHRFIPPQNPKSKDRREKAETTLEKYKQEIKGRKDKLNSQLLSAFDMNQRQLPSRLLDEWMNIRPASHSVKLRTYVKQLNEDCRLRLRKFRKDGDGKARAIPLVGEMATFLSQDIVRMIISEETKKLITSAYYNEMQRSLAQYAGEENRRQFRAIVAELHLLDPSSGHPFLSATMETAHRYTEDFYKCYLEKKREWLAKTFYRPEQDENTKRRISVFFVPDGEARKLLPLLIRRRMKEQNDLQDWIRNKQAHPIDLPSHLFDSKIMELLKVKDGKKKWNEAFKDWWSTKYPDGMQPFYGLRRELNIHGKSVSYIPSDGKKFADCYTHLMEKTVQDKKRELRTAGKPVPPDLAADIKRSFHRAVNEREFMLRLVQEDDRLMLMAINKMMTDREEDILPGLKNIDSILDEENQFSLAVHAKVLEKEGEGGDNSLSLVPATIEIKSKRKDWSKYIRYRYDRRVPGLMSHFPEHKATLDEVKTLLGEYDRCRIKIFDWAFALEGAIMSDRDLKPYLHESSSREGKSGEHSTLVKMLVEKKGCLTPDESQYLILIRNKAAHNQFPCAAEMPLIYRDVSAKVGSIEGSSAKDLPEGSSLVDSLWKKYEMIIRKILPILDPENRFFGKLLNNMSQPINDL

SEQ ID NO: 126 - protein, 1133 aa, Prevotella falsenii
MKNDNNSTKSTDYTLGDKHFWAAFLNLARHNVYITVNHINKVLELKNKKDQEIIIDNDQDILAIKTLWGKVDTDINKKDRLRELIMKHFPFLEAATYQQSSTNNTKQKEEEQAKAQSFESLKDCLFLFLEKLREARNYYSHYKHSKSLEEPKLEEKLLENMYNIFDTNVQLVIKDYEHNKDINPEEDFKHLGRAEGEFNYYFTRNKKGNITESGLLFFVSLFLEKKDAIWAQTKIKGFKDNRENKQKMTHEVFCRSRMLLPKLRLESTQTQDWILLDMLNELIRCPKSLYKRLQGEKREKFRVPFDPADEDYDAEQEPFKNTLVRHQDRFPYFALRYFDYNEIFTNLRFQIDLGTYHFSIYKKQIGDKKEDRHLTHKLYGFERIQEFAKENRPDEWKALVKDLDTFEESNEPYISETTPHYHLENQKIGIRNKNKKKKKTIWPSLETKTTVNERSKYNLGKSFKAEAFLSVHELLPMMFYYLLLNKEEPNNGKINASKVEGIIEKKIRDIYKLYGAFANEEINNEEELKEYCEGKDIAIRHLPKQMIAILKNEYKDMAKKAEDKQKKMIKDTKKRLAALDKQVKGEVEDGGRNIKPLKSGRIASWLVNDMMRFQPVQRDRDGYPLNNSKANSTEYQLLQRTLALFGSERERLAPYFRQMNLIGKDNPHPFLKDTKWKEHNNILSFYRSYLEAKKNFLGSLKPEDWKKNQYFLKLKEPKTNRETLVQGWKNGFNLPRGIFTEPIREWFIRHQNESEEYKKVKDFDRIGLVAKVIPLFFKEDYQKEIEDYVQPFYGYPFNVGNIHNSQEGTFLNKKEREELWKGNKTKFKDYKTKEKNKEKTNKDKFKKKTDEEKEEFRSYLDFQSWKKFERELRLVRNQDIVTWLLCMELIDKLKIDELNIEELQKLRLKDIDTDTAKKEKNNILNRIMPMELPVTVYETDDSNNIIKDKPLHTIYIKEAETKLLKQGNFKALVKDRRLNGLFSFVETSSEAELKSKPISKSLVEYELGEYQRARVEIIKDMLRLEETLIGNDEKLPTNKFRQMLDKWLEHKKETDDTDLKNDVKLLTEVRNAFSHNQYPMRDRIAFANIKPFSLSSANTSNEEGLGIAKKLKDKTKETIDRIIEIEEQTATKR

SEQ ID NO: 127 - protein, 1116 aa, Prevotella pleuritidis
MENDKRLEESTCYTLNDKHFWAAFLNLARHNVYITINHINKLLEIRQIDNDEKVLDIKALWQKVDKDINQKARLRELMIKHFPFLEAAIYSNNKEDKEEVKEEKQAKAQSFKSLKDCLFLFLEKLQEARNYYSHYKSSESSKEPEFEEGLLEKMYNTFGVSIRLVKEDYQYNKDIDPEKDFKHLERKEDFNYLFTDKDNKGKITKNGLLFFVSLFLEKKDAIWMQQKLRGFKDNRGNKEKMTHEVFCRSRMLLPKIRLESTQTQDWILLDMLNELIRCPKSLYERLQGAYREKFKVPFDSIDEDYDAEQEPFRNTLVRHQDRFPYFALRYFDYNEIFKNLRFQIDLGTYHFSIYKKLIGDNKEDRHLTHKLYGFERIQEFAKQKRPNEWQALVKDLDIYETSNEQYISETTPHYHLENQKIGIRFKNKKDKIWPSLETNGKENEKSKYNLDKSFQAEAFLSIHELLPMMFYDLLLKKEEPNNDEKNASIVEGFIKKEIKRMYAIYDAFANEEINSKEGLEEYCKNKGFQERHLPKQMIAILTNKSKNMAEKAKRKQKEMIKDTKKRLATLDKQVKGEIEDGGRNIRLLKSGEIARWLVNDMMRFQSVQKDKEGKPLNNSKANSTEYQMLQRSLALYNKEQKPTPYFIQVNLIKSSNPHPFLEETKWEECNNILSFYRSYLEAKKNFLESLKPEDWKKNQYFLMLKEPKTNRKTLVQGWKNGFNLPRGIFTEPIKEWFKRHQNDSEEYKKVEALDRVGLVAKVIPLFFKEEYFKEDAQKEINNCVQPFYSFPYNVGNIHKPEEKNFLHCEERRKLWDKKKDKFKGYKAKEKSKKMTDKEKEEHRSYLEFQSWNKFERELRLVRNQDIVTWLLCTELIDKLKIDELNIEELQKLRLKDIDTDTAKKEKNNILNRIMPMQLPVTVYEIDKSFNIVKDKPLHTIYIEETGTKLLKQGNFKALVKDRRLNGLFSFVKTSSEAESKSKPISKLRVEYELGAYQKARIDIIKDMLALEKTLIDNDENLPTNKFSDMLKSWLKGKGEANKARLQNDVDLLVAIRNAFSHNQYPMYNSEVFKGMKLLSLSSDIPEKEGLGIAKQLKDKIKETIERIIEIEKEIRN

SEQ ID NO: 128 - protein, 1119 aa, Porphyromonas gingivalis
MTEQNERPYNGTYYTLEDKHFWAAFFNLARHNAYITLAHIDRQLAYSKADITNDEDILFFKGQWKNLDNDLERKARLRSLILKHFSFLEGAAYGKKLFESQSSGNKSSKKKELTKKEKEELQANALSLDNLKSILFDFLQKLKDFRNYYSHYRHPESSELPLFDGNMLQRLYNVFDVSVQRVKRDHEHNDKVDPHRHFNHLVRKGKKDRYGNNDNPFFKHHFVDREGTVTEAGLLFFVSLFLEKRDAIWMQKKIRGFKGGTEAYQQMTNEVFCRSRISLPKLKLESLRTDDWMLLDMLNELVRCPKSLYDRLREEDRARFRVPIDILSDEDDTDGTEEDPFKNTLVRHQDRFPYFALRYFDLKKVFTSLRFHIDLGTYHFAIYKKNIGEQPEDRHLTRNLYGFGRIQDFAEEHRPEEWKRLVRDLDYFETGDKPYITQTTPHYHIEKGKIGLRFVPEGQHLWPSPEVGATRTGRSKYAQDKRLTAEAFLSVHELMPMMFYYFLLREKYSEEVSAEKVQGRIKRVIEDVYAVYDAFARGEIDTLDRLDACLADKGIRRGHLPRQMIAILSQEHKDMEEKVRKKLQEMIADTDHRLDMLDRQTDRKIRIGRKNAGLPKSGVIADWLVRDMMRFQPVAKDTSGKPLNNSKANSTEYRMLQRALALFGGEKERLTPYFRQMNLTGGNNPHPFLHETRWESHTNILSFYRSYLKARKAFLQSIGRSDREENHRFLLLKEPKTDRQTLVAGWKSEFHLPRGIFTEAVRDCLIEMGYDEVGSYKEVGFMAKAVPLYFERACKDRVQPFYDYPFNVGNSLKPKKGRFLSKEKRAEEWESGKERFRLAKLKKEILEAKEHPYLDFKSWQKFERELRLVKNQDIITWMMCRDLMEENKVEGLDTGTLYLKDIRTDVHEQGSLNVLNRVKPMRLPVVVYRADSRGHVHKEQAPLATVYIEERDTKLLKQGNFKSFVKDRRLNGLFSFVDTGALAMEQYPISKLRVEYELAKYQTARVCAFEQTLELEESLLTRYPHLPDKNFRKMLESWSDPLLDKWPDLHRKVRLLIAVRNAFSHNQYPMYDEAVFSSIRKYDPSSPDAIEERMGLNIAHRLSEEVKQAKEMAERIIQV

SEQ ID NO: 129 - protein, 1175 aa, Porphyromonas gulae
MTEQSERPYNGTYYTLEDKHFWAAFLNLARHNAYITLTHIDRQLAYSKADITNDQDVLSFKALWKNLDNDLERKSRLRSLILKHFSFLEGAAYGKKLFESKSSGNKSSKNKELTKKEKEELQANALSLDNLKSILFDFLQKLKDFRNYYSHYRHSGSSELPLFDGNMLQRLYNVFDVSVQRVKRDHEHNDKVDPHRHFNHLVRKGKKDRYGHNDNPSFKHHFVDSEGMVTEAGLLFFVSLFLEKRDAIWMQKKIRGFKGGTETYQQMTNEVFCRSRISLPKLKLESLRMDDWMLLDMLNELVRCPKPLYDRLREDDRACFRVPVDILPDEDDTDGGGEDPFKNTLVRHQDRFPYFALRYFDLKKVFTSLRFHIDLGTYHFAIYKKMIGEQPEDRHLTRNLYGFGRIQDFAEEHRPEEWKRLVRDLDYFETGDKPYISQTSPHYHIEKGKIGLRFMPEGQHLWPSPEVGTTRTGRSKYAQDKRLTAEAFLSVHELMPMMFYYFLLREKYSEEVSAEKVQGRIKRVIEDVYAIYDAFARDEINTLKELDACLADKGIRRGHLPKQMIAILSQEHKNMEEKVRKKLQEMIADTDHRLDMLDRQTDRKIRIGRKNAGLPKSGVIADWLVRDMMRFQPVAKDASGKPLNNSKANSTEYRMLQRALALFGGEKERLTPYFRQMNLTGGNNPHPFLHDTRWESHTNILSFYRSYLRARKAFLERIGRSDRMENRPFLLLKEPKTDRQTLVAGWKSEFHLPRGIFTEAVRDCLIEMGYDEVGSYREVGFMAKAVPLYFERACEDRVQPFYDSPFNVGNSLKPKKGRFLSKEERAEEWERGKERFRDLEAWSHSAARRIEDAFAGIEYASPGNKKKIEQLLRDLSLWEAFESKLKVRADKINLAKLKKEILEAQEHPYHDFKSWQKFERELRLVKNQDIITWMMCRDLMEENKVEGLDTGTLYLKDIRTNVQEQGSLNVLNHVKPMRLPVVVYRADSRGHVHKEEAPLATVYIEERDTKLLKQGNFKSFVKDRRLNGLFSFVDTGGLAMEQYPISKLRVEYELAKYQTARVCAFEQTLELEESLLTRYPHLPDKNFRKMLESWSDPLLAKWPELHGKVRLLIAVRNAFSHNQYPMYDEAVFSSIRKYDPSSPDAIEERMGLNIAHRLSEEVKQAKETVERIIQA

SEQ ID NO: 130 - protein, 1119 aa, Porphyromonas gulae
MTEQSERPYNGTYYTLEDKHFWAAFLNLARHNAYITLTHIDRQLAYSKADITNDQDVLSFKALWKNLDNDLERKSRLRSLILKHFSFLEGAAYGKKLFESKSSGNKSSKNKELTKKEKEELQANALSLDNLKSILFDFLQKLKDFRNYYSHYRHSGSSELPLFDGNMLQRLYNVFDVSVQRVKRDHEHNDKVDPHRHFNHLVRKGKKDRYGHNDNPSFKHHFVDGEGMVTEAGLLFFVSLFLEKRDAIWMQKKIRGFKGGTETYQQMTNEVFCRSRISLPKLKLESLRTDDWMLLDMLNELVRCPKPLYDRLREKDRARFRVPVDILPDEDDTDGGGEDPFKNTLVRHQDRFPYFALRYFDLKKVFTSLRFHIDLGTYHFAIYKKVIGEQPEDRHLTRNLYGFGRIQDFAEEHRPEEWKRLVRDLDYFETGDKPYISQTTPHYHIEKGKIGLRFVPEGQHLWPSPEVGTTRTGRSKYAQDKRLTAEAFLSVHELMPMMFYYFLLREKYSEEVSAEKVQGRIKRVIEDVYAIYDAFARDEINTRDELDACLADKGIRRGHLPKQMIGILSQEHKNMEEKVRKKLQEMIADTDHRLDMLDRQTDRKIRIGRKNAGLPKSGVIADWLVRDMMRFQPVAKDTSGKPLNNSKANSTEYRMLQRALALFGGEKERLTPYFRQMNLTGGNNPHPFLDETRWESHTNILSFYRSYLRARKAFLERIGRSDRVENRPFLLLKEPKTDRQTLVAGWKSEFHLPRGIFTEAVRDCLIEMGYDEVGSYKEVGFMAKAVPLYFERACKDRVQPFYDSPFNVGNSLKPKKGRFLSKEKRAEEWESGKERFRLAKLKKEILEAQEHPYHDFKSWQKFERELRLVKNQDIITWMMCRDLMEENKVEGLDTGTLYLKDIRPNVQEQGSLNVLNRVKPMRLPVVVYRADSRGHVHKEEAPLATVYIEERDTKLLKQGNFKSFVKDRRLNGLFSFVDTGGLAMEQYPISKLRVEYELAKYQTARVCVFELTLRLEESLLSRYPHLPDESFREMLESWSDPLLAKWPELHGKVRLLIAVRNAFSHNQYPMYDEAVFSSIRKYDPSSPDAIEERMGLNIAHRLSEEVKQAKETVERIIQA

SEQ ID NO: 131 - protein, 1119 aa, Porphyromonas gulae
MTEQSERPYNGTYYTLEDKHFWAAFLNLARHNAYITLTHIDRQLAYSKADITNDQDVLSFKALWKNFDNDLERKSRLRSLILKHFSFLEGAAYGKKLFESKSSGNKSSKNKELTKKEKEELQANALSLDNLKSILFDFLQKLKDFRNYYSHYRHSGSSELPLFDGNMLQRLYNVFDVSVQRVKRDHEHNDKVDPHYHFNHLVRKGKKDRYGHNDNPSFKHHFVDSEGMVTEAGLLFFVSLFLEKRDAIWMQKKIRGFKGGTGPYEQMTNEVFCRSRISLPKLKLESLRTDDWMLLDMLNELVRCPKPLYDRLREKDRACFRVPVDILPDEDDTDGGGEDPFKNTLVRHQDRFPYFALRYFDLKKVFTSLRFHIDLGTYHFAIYKKMIGEQPEDRHLTRNLYGFGRIQDFAEEHRPEEWKRLVRDLDYFETGDKPYISQTTPHYHIEKGKIGLRFMPEGQHLWPSPEVGTTRTGRSKYAQDKRLTAEAFLSVHELMPMMFYYFLLREKYSEEVSAEKVQGRIKRVIKDVYAIYDAFARDEINTLKELDACSADKGIRRGHLPKQMIGILSQEHKNMEEKVRKKLQEMIADTDHRLDMLDRQTDRKIRIGRKNAGLPKSGVIADWLVRDMMRFQPVAKDTSGKPLNNSKANSTEYRMLQRALALFGGEKERLTPYFRQMNLTGGNNPHPFLDETRWESHTNILSFYRSYLRARKAFLERIGRSDRVENRPFLLLKEPKNDRQTLVAGWKSEFHLPRGIFTEAVRDCLIEMGYDEVGSYKEVGFMAKAVPLYFERACKDRVQPFYDSPFNVGNSLKPKKGRFLSKEKRAEEWESGKERFRLAKLKKEILEAKEHPYHDFKSWQKFERELRLVKNQDIITWMMCRDLMEENKVEGLDTGTLYLKDIRTDVHEQGSLNVLNRVKPMRLPVVVYRADSRGHVHKEQAPLATVYIEERDTKLLKQGNFKSFVKDRRLNGLFSFVDTGGLAMEQYPISKLRVEYELAKYQTARVCAFEQTLELEESLLTRYPHLPDENFREMLESWSDPLLGKWPDLHGKVRLLIAVRNAFSHNQYPMYDEAVFSSIRKYDPSSPDAIEERMGLNIAHRLSEEVKQAKETVERIIQA

SEQ ID NO: 132 - protein, 1175 aa, Porphyromonas gulae
MTEQSERPYNGTYYTLEDKHFWAAFLNLARHNAYITLTHIDRQLAYSKADITNDQDVLSFKALWKNFDNDLERKSRLRSLILKHFSFLEGAAYGKKLFESKSSGNKSSKNKELTKKEKEELQANALSLDNLKSILFDFLQKLKDFRNYYSHYRHSESSELPLFDGNMLQRLYNVFDVSVQRVKRDHEHNDKVDPHRHFNHLVRKGKKDRYGHNDNPSFKHHFVDGEGMVTEAGLLFFVSLFLEKRDAIWMQKKIRGFKGGTETYQQMTNEVFCRSRISLPKLKLESLRTDDWMLLDMLNELVRCPKPLYDRLREDDRACFRVPVDILPDEDDTDGGGEDPFKNTLVRHQDRFPYFALRYFDLKKVFTSLRFHIDLGTYHFAIYKKMIGEQPEDRHLTRNLYGFGRIQDFAEEHRPEEWKRLVRDLDYFETGDKPYISQTSPHYHIEKGKIGLRFMPEGQHLWPSPEVGTTRTGRSKYAQDKRLTAEAFLSVHELMPMMFYYFLLREKYSEEVSAEKVQGRIKRVIEDVYAIYDAFARDEINTLKELDACLADKGIRRGHLPKQMIAILSQEHKDMEEKIRKKLQEMIADTDHRLDMLDRQTDRKIRIGRKNAGLPKSGVIADWLVRDMMRFQPVAKDTSGKPLNNSKANSTEYRMLQRALALFGGEKKRLTPYFRQMNLTGGNNPHPFLHETRWESHTNILSFYRSYLRARKAFLERIGRSDRMENRPFLLLKEPKTDRQTLVAGWKSEFHLPRGIFTEAVRDCLIEMGYDEVGSYREVGFMAKAVPLYFERACEDRVQPFYDSPFNVGNSLKPKKGRFLSKEERAEEWERGKERFRDLEAWSHSAARRIEDAFAGIEYASPGNKKKIEQLLRDLSLWEAFESKLKVRADKINLAKLKKEILEAQEHPYHDFKSWQKFERELRLVKNQDIITWMMCRDLMEENKVEGLDTGTLYLKDIRPNVQEQGSLNVLNRVKPMRLPVVVYRADSRGHVHKEEAPLATVYIEERDTKLLKQGNFKSFVKDRRLNGLFSFVDTGGLAMEQYPISKLRVEYELAKYQTARVCVFELTLRLEESLLTRYPHLPDESFRKMLESWSDPLLAKWPELHGKVRLLIAVRNAFSHNQYPMYDEAVFSSIRKYDPSSPDAIEERMGLNIAHRLSEEVKQAKETVERIIQV

SEQ ID NO: 133 - protein, 1119 aa, Porphyromonas gulae
MTEQSERPYNGTYYTLEDKHFWAAFLNLARHNAYITLTHIDRQLAYSKADITNDEDILFFKGQWKNLDNDLERKSRLRSLILKHFSFLEGAAYGKKFFESKSSGNKSSKNKELTKKEKEELQANALSLDNLKSILFDFLQKLKDFRNYYSHYRHSGSSELPLFDGNMLQRLYNVFDVSVQRVKRDHEHNDEVDPHYHFNHLVRKGKKDRYGHNDNPSFKHHFVDGEGMVTEAGLLFFVSLFLEKRDAIWMQKKIRGFKGGTEPYEQMTNEVFCRSRISLPKLKLESLRTDDWMLLDMLNELVRCPKPLYDRLREKDRACFRVPVDILPDEDDTDGGGEDPFKNTLVRHQDRFPYFALRYFDLKKVFTSLRFHIDLGTYHFAIYKKMIGEQPEDRHLTRNLYGFGRIQDFAEEHRPEEWKRLVRDLDYFETGDKPYISQTTPHYHIEKGKIGLRFVPEGQHLWPSPEVGTTRTGRSKYAQDKRLTAEAFLSVHELMPMMFYYFLLREKYSEEVSAEKVQGRIKRVIEDVYAIYDAFARDEINTLKELDACLADKGIRRGHLPKQMIGILSQERKDMEEKVRKKLQEMIADTDHRLDMLDRQTDRKIRIGRKNAGLPKSGVIADWLVRDMMRFQPVAKDTSGKPLNNSKANSTEYRMLQRALALFGGEKERLTPYFRQMNLTGGNNPHPFLHETRWESHTNILSFYRSYLRARKAFLERIGRSDRVENCPFLLLKEPKTDRQTLVAGWKGEFHLPRGIFTEAVRDCLIEMGYDEVGSYREVGFMAKAVPLYFERACEDRVQPFYDSPFNVGNSLKPKKGRFLSKEKRAEEWESGKERFRLAKLKKEILEAQEHPYHDFKSWQKFERELRLVKNQDIITWMMCRDLMEENKVEGLDTGTLYLKDIRPNVQEQGSLNVLNRVKPMRLPVVVYRADSRGHVHKEEAPLATVYIEERDTKLLKQGNFKSFVKDRRLNGLFSFVDTGALAMEQYPISKLRVEYELAKYQTARVCAFEQTLELEESLLTRYPHLPDESFREMLESWSDPLLTKWPELHGKVRLLIAVRNAFSHNQYPMYDEAVFSSIWKYDPSSPDAIEERMGLNIAHRLSEEVKQAKETIERIIQA

SEQ ID NO: 134 - protein, 1174 aa, Porphyromonas gulae
MTEQSERPYNGTYYTLEDKHFWAAFLNLARHNAYITLTHIDRQLAYSKADITNDQDVLSFKALWKNLDNDLERKSRLRSLILKHFSFLEGAAYGKKLFESKSSGNKSSKNKELTKKEKEELQANALSLDNLKSILFDFLQKLKDFRNYYSHYRHSGSSELPLFDGNMLQRLYNVFDVSVQRVKRDHEHNDKVDPHYHFNHLVRKGKKDRYGHNDNPSFKHHFVDSEGMVTEAGLLFFVSLFLEKRDAIWMQKKIRGFKGGTGPYEQMTNEVFCRSRISLPKLKLESLRTDDWMLLDMLNELVRCPKPLYDRLREKDRACFRVPVDILPDEDDTDGGGEDPFKNTLVRHQDRFPYFALRYFDLKKVFTSLRFHIDLGTYHFAIYKKMIGEQPEDRHLTRNLYGFGRIQDFAEEHRPEEWKRLVRDLDYLETGDKPYISQTTPHYHIEKGKIGLRFVPEGQHLWPSPEVGTTRTGRSKCAQDKRLTAEAFLSVHELMPMMFYYFLLREKYSEEVSAEKVQGRIKRVIEDVYAIYDAFARDEINTLKELDTCLADKGIRRGHLPKQMITILSQERKDMKEKIRKKLQEMIADTDHRLDMLDRQTDRKIRIGRKNAGLPKSGVIADWLVRDMMRFQPVAKDASGKPLNNSKANSTEYRMLQRALALFGGEKERLTPYFRQMNLTGGNNPHPFLHETRWESHTNILSFYRSYLRARKAFLERIGRSDRVENCPFLLLKEPKTDRQTLVAGWKDEFHLPRGIFTEAVRDCLIEMGYDEVGSYREVGFMAKAVPLYFERACEDRVQPFYDSPFNVGNSLKPKKGRFLSKEDRAEEWERGMERFRDLEAWSHSAARRIKDAFAGIEYASPGNKKKIEQLLRDLSLWEAFESKLKVRADKINLAKLKKEILEAQEHPYHDFKSWQKFERELRLVKNQDIITWMMCRDLMEENKVEGLDTGTLYLKDIRPNVQEQGSLNVLNRVKPMRLPVVVYRADSRGHVHKEAPLATVYIEERNTKLLKQGNFKSFVKDRRLNGLFSFVDTGGLAMEQYPISKLRVEYELAKYQTARVCVFELTLRLEESLLSRYPHLPDESFREMLESWSDPLLAKWPELHGKVRLLIAVRNAFSHNQYPMYDEAVFSSIRKYDPSSPDAIEERMGLNIAHRLSEEVKQAKETVERIIQA

SEQ ID NO: 135 - protein, 1135 aa, Porphyromonas gulae
MNTVPATENKGQSRTVEDDPQYFGLYLNLARENLIEVESHVRIKFGKKKLNEESLKQSLLCDHLLSIDRWTKVYGHSRRYLPFLHCFDPDSGIEKDHDSKTGVDPDSAQRLIRELYSLLDFLRNDFSHNRLDGTTFEHLKVSPDISSFITGAYTFACERAQSRFADFFKPDDFLLAKNRKEQLISVADGKECLTVSGFAFFICLFLDREQASGMLSRIRGFKRTDENWARAVHETFCDLCIRHPHDRLESSNTKEALLLDMLNELNRCPRILYDMLPEEERAQFLPALDENSMNNLSENSLNEESRLLWDGSSDWAEALTKRIRHQDRFPYLMLRFIEEMDLLKGIRFRVDLGEIELDSYSKKVGRNGEYDRTITDHALAFGKLSDFQNEEEVSRMISGEASYPVRFSLFAPRYAIYDNKIGYCHTSDPVYPKSKTGEKRALSNPQSMGFISVHDLRKLLLMELLCEGSFSRMQSDFLRKANRILDETAEGKLQFSALFPEMRHRFIPPQNPKSKDRREKAETTLEKYKQEIKGRKDKLNSQLLSAFDMNQRQLPSRLLDEWMNIRPASHSVKLRTYVKQLNEDCRLRLRKFRKDGDGKARAIPLVGEMATFLSQDIVRMIISEETKKLITSAYYNEMQRSLAQYAGEENRRQFRAIVAELHLLDPSSGHPFLSATMETAHRYTEDFYKCYLEKKREWLAKTFYRPEQDENTKRRISVFFVPDGEARKLLPLLIRRRMKEQNDLQDWIRNKQAHPIDLPSHLFDSKIMELLKVKDGKKKWNEAFKDWWSTKYPDGMQPFYGLRRELNIHGKSVSYIPSDGKKFADCYTHLMEKTVRDKKRELRTAGKPVPPDLAAYIKRSFHRAVNEREFMLRLVQEDDRLMLMAINKMMTDREEDILPGLKNIDSILDEENQFSLAVHAKVLEKEGEGGDNSLSLVPATIEIKSKRKDWSKYIRYRYDRRVPGLMSHFPEHKATLDEVKTLLGEYDRCRIKIFDWAFALEGAIMSDRDLKPYLHESSSREGKSGEHSTLVKMLVEKKGCLTPDESQYLILIRNKAAHNQFPCAAEMPLIYRDVSAKVGSIEGSSAKDLPEGSSLVDSLWKKYEMIIRKILPILDHENRFFGKLLNNMSQPINDL

SEQ ID NO: 136 - protein, 1218 aa, Capnocytophaga cynodegmi
MENKTSLGNNIYYNPFKPQDKSYFAGYLNAAMENIDSVFRELGKRLKGKEYTSENFFDAIFKENISLVEYERYVKLLSDYFPMARLLDKKEVPIKERKENFKKNFRGIIKAVRDLRNFYTHKEHGEVEITDEIFGVLDEMLKSTVLTVKKKKIKTDKTKEILKKSIEKQLDILCQKKLEYLKDTARKIEEKRRNQRERGEKKLVPRFEYSDRRDDLIAAIYNDAFDVYIDKKKDSLKESSKTKYNTESYPQQEEGDLKIPISKNGVVFLLSLFLSKQEVHAFKSKIAGFKATVIDEATVSHRKNSICFMATHEIFSHLAYKKLKRKVRTAEINYSEAENAEQLSIYAKETLMMQMLDELSKVPDVVYQNLSEDVQKTFIEDWNEYLKENNGDVGTMEEEQVIHPVIRKRYEDKFNYFAIRFLDEFAQFPTLRFQVHLGNYLHDSRPKEHLISDRRIKEKITVFGRLSELEHKKALFIKNTETNEDRKHYWEVFPNPNYDFPKENISVNDKDFPIAGSILDREKQPTAGKIGIKVNLLNQKYISEVDKAVKAHQLKQRNNKPSIQNIIEEIVPINGSNPKEIIVFGGQPTAYLSMNDIHSILYEFFDKWEKKKEKLEKKGEKELRKEIGKELEEKIVGKIQTQIQQIIDKDINAKILKPYQDDDSTAIDKEKLIKDLKQEQKILQKLKNEQTAREKEYQECIAYQEESRKIKRSDKSRQKYLRNQLKRKYPEVPTRKEILYYQEKGKVAVWLANDIKRFMPTDFKNEWKGEQHSLLQKSLAYYEQCKEELKNLLPQQKVFKHLPFELGGHFQQKYLYQFYTRYLDKRLEHISGLVQQAENFKNENKVFKKVENECFKFLKKQNYTHKGLDAQAQSVLGYPIFLERGFMDEKPTIIKGKTFKGNESLFTDWFRYYKEYQNFQTFYDTENYPLVELEKKQADRKRETKIYQQKKNDVFTLLMAKHIFKSVFKQDSIDRFSLEDLYQSREERLENQEKAKQTGERNTNYIWNKTVDLNLCDGKVTVENVKLKNVGNFIKYEYDQRVQTFLKYEENIKWQAFLIKESKEEENYPYIVEREIEQYEKVRREELLKEVHLIEEYILEKVKDKEILKKGDNQNFKYYILNGLLKQLKNEDVESYKVFNLNTKPEDVNINQLKQEATDLEQKAFVLTYIRNKFAHNQLPKKEFWDYCQEKYGKIEKEKTYAEYFAEVFKREKEALMK

SEQ ID NO: 137 - protein, 1090 aa, Prevotella sp.
MNIPALVENQKKYFGTYSVMAMLNAQTVLDHIQKVADIEGEQNENNENLWFHPVMSHLYNAKNGYDKQPEKTMFIIERLQSYFPFLKIMAENQREYSNGKYKQNRVEVNSNDIFEVLKRAFGVLKMYRDLTNHYKTYEEKLIDGCEFLTSTEQPLSGMISKYYTVALRNTKERYGYKTEDLAFIQDNIKKITKDAYGKRKSQVNTGFFLSLQDYNGDTQKKLHLSGVGIALLICLFLDKQYINIFLSRLPIFSSYNAQSEERRIIIRSFGINSIKLPKDRIHSEKSNKSVAMDMLNEVKRCPDELFTTLSAEKQSRFRIISDDHNEVLMKRSTDRFVPLLLQYIDYGKLFDHIRFHVNMGKLRYLLKADKTCIDGQTRVRVIEQPLNGFGRLEEAETMRKQENGTFGNSGIRIRDFENVKRDDANPANYPYIVDTYTHYILENNKVEMFISDKGSSAPLLPLIEDDRYVVKTIPSCRMSTLEIPAMAFHMFLFGSKKTEKLIVDVHNRYKRLFQAMQKEEVTAENIASFGIAESDLPQKILDLISGNAHGKDVDAFIRLTVDDMLTDTERRIKRFKDDRKSIRSADNKMGKRGFKQISTGKLADFLAKDIVLFQPSVNDGENKITGLNYRIMQSAIAVYDSGDDYEAKQQFKLMFEKARLIGKGTTEPHPFLYKVFARSIPANAVDFYERYLIERKFYLTGLCNEIKRGNRVDVPFIRRDQNKWKTPAMKTLGRIYSEDLPVELPRQMFDNEIKSHLKSLPQMEGIDFNNANVTYLIAEYMKRVLNDDFQTFYQWKRNYHYMDMLKGEYDRKGSLQHCFTSVEEREGLWKERASRTERYRKLASNKIRSNRQMRNASSEEIETILDKRLSNCRNEYQKSEKVIRRYRVQDALLFLLAKKTLTELADFDGERFKLKEIMPDAEKGILSEIMPMSFTFEKGGKKYTITSEGMKLKNYGDFFVLASDKRIGNLLELVGSDIVSKEDIMEEFNKYDQCRPEISSIVFNLEKWAFDTYPELSARVDREEKVDFKSILKILLNNKNINKEQSDILRKIRNAFDHNNYPDKGIVEIKALPEIAMSIKKAFGEYAIMK

SEQ ID NO: 138 - protein, 1090 aa, Prevotella sp.
MNIPALVENQKKYFGTYSVMAMLNAQTVLDHIQKVADIEGEQNENNENLWFHPVMSHLYNAKNGYDKQPEKTMFIIERLQSYFPFLKIMAENQREYSNGKYKQNRVEVNSNDIFEVLKRAFGVLKMYRDQASHYKTYDEKLIDGCEFLTSTEQPLSGMINNYYTVALRNMNERYGYKTEDLAFIQDKRFKFVKDAYGKKKSQVNTGFFLSLQDYNGDTQKKLHLSGVGIALLICLFLDKQYINIFLSRLPIFSSYNAQSEERRIIIRSFGINSIKQPKDRIHSEKSNKSVAMDMLNEIKRCPNELFETLSAEKQSRFRIISNDHNEVLMKRSSDRFVPLLLQYIDYGKLFDHIRFHVNMGKLRYLLKADKTCIDGQTRVRVIEQPLNGFGRLEEVETMRKQENGTFGNSGIRIRDFENMKRDDANPANYPYIVDTYTHYILENNKVEMFISDEETPAPLLPVIEDDRYVVKTIPSCRMSTLEIPAMAFHMFLFGSKKTEKLIVDVHNRYKRLFKAMQKEEVTAENIASFGIAESDLPQKIIDLISGNAHGKDVDAFIRLTVDDMLADTERRIKRFKDDRKSIRSADNKMGKRGFKQISTGKLADFLAKDIVLFQPSVNDGENKITGLNYRIMQSAIAVYNSGDDYEAKQQFKLMFEKARLIGKGTTEPHPFLYKVFVRSIPANAVDFYERYLIERKFYLIGLSNEIKKGNRVDVPFIRRDQNKWKTPAMKTLGRIYDEDLPVELPRQMFDNEIKSHLKSLPQMEGIDFNNANVTYLIAEYMKRVLNDDFQTFYQWKRNYRYMDMLRGEYDRKGSLQSCFTSVEEREGLWKERASRTERYRKLASNKIRSNRQMRNASSEEIETILDKRLSNSRNEYQKSEKVIRRYRVQDALLFLLAKKTLTELADFDGERFKLKEIMPDAEKGILSEIMPMSFTFEKGGKKYTITSEGMKLKNYGDFFVLASDKRIGNLLELVGSDTVSKEDIMEEFKKYDQCRPEISSIVFNLEKWAFDTYPELSARVDREEKVDFKSILKILLNNKNINKEQSDILRKIRNAFDHNNYPDKGVVEIRALPEIAMSIKKAFGEYAIMK

SEQ ID NO: 139 - protein, 1090 aa, Prevotella sp.
MNIPALVENQKKYFGTYSVMAMLNAQTVLDHIQKVADIEGEQNENNENLWFHPVMSHLYNAKNGYDKQPEKTMFIIERLQSYFPFLKIMAENQREYSNGKYKQNRVEVNSNDIFEVLKRAFGVLKMYRDLTNHYKTYEEKLIDGCEFLTSTEQPFSGMISKYYTVALRNTKERYGYKAEDLAFIQDNRYKFTKDAYGKRKSQVNTGSFLSLQDYNGDTTKKLHLSGVGIALLICLFLDKQYINLFLSRLPIFSSYNAQSEERRIIIRSFGINSIKQPKDRIHSEKSNKSVAMDMLNEVKRCPDELFTTLSAEKQSRFRIISDDHNEVLMKRSSDRFVPLLLQYIDYGKLFDHIRFHVNMGKLRYLLKADKTCIDGQTRVRVIEQPLNGFGRLEEVETMRKQENGTFGNSGIRIRDFENMKRDDANPANYPYIVETYTHYILENNKVEMFISDEENPTPLLPVIEDDRYVVKTIPSCRMSTLEIPAMAFHMFLFGSEKTEKLIIDVHDRYKRLFQAMQKEEVTAENIASFGIAESDLPQKIMDLISGNAHGKDVDAFIRLTVDDMLTDTERRIKRFKDDRKSIRSADNKMGKRGFKQISTGKLADFLAKDIVLFQPSVNDGENKITGLNYRIMQSAIAVYDSGDDYEAKQQFKLMFEKARLIGKGTTEPHPFLYKVFVRSIPANAVDFYERYLIERKFYLIGLSNEIKKGNRVDVPFIRRDQNKWKTPAMKTLGRIYSEDLPVELPRQMFDNEIKSHLKSLPQMEGIDFNNANVTYLIAEYMKRVLNDDFQTFYQWKRNYRYMDMLRGEYDRKGSLQHCFTSIEEREGLWKERASRTERYRKLASNKIRSNRQMRNASSEEIETILDKRLSNCRNEYQKSEKIIRRYRVQDALLFLLAKKTLTELADFDGERFKLKEIMPDAEKGILSEIMPMSFTFEKGGKIYTITSGGMKLKNYGDFFVLASDKRIGNLLELVGSNTVSKEDIMEEFKKYDQCRPEISSIVFNLEKWAFDTYPELPARVDRKEKVDFWSILDVLSNNKDINNEQSYILRKIRNAFDHNNYPDKGIVEIKALPEIAMSIKKAFGEYAIMK

SEQ ID NO: 140 - protein, 1131 aa, Phaeodactylibacter xiamenensis
MTNTPKRRTLHRHPSYFGAFLNIARHNAFMIMEHLSTKYDMEDKNTLDEAQLPNAKLFGCLKKRYGKPDVTEGVSRDLRRYFPFLNYPLFLHLEKQQNAEQAATYDINPEDIEFTLKGFFRLLNQMRNNYSHYISNTDYGKFDKLPVQDIYEAAIFRLLDRGKHTKRFDVFESKHTRHLESNNSEYRPRSLANSPDHENTVAFVTCLFLERKYAFPFLSRLDCFRSTNDAAEGDPLIRKASHECYTMFCCRLPQPKLESSDILLDMVNELGRCPSALYNLLSEEDQARFHIKREEITGFEEDPDEELEQEIVLKRHSDRFPYFALRYFDDTEAFQTLRFDVYLGRWRTKPVYKKRIYGQERDRVLTQSIRTFTRLSRLLPIYENVKHDAVRQNEEDGKLVNPDVTSQFHKSWIQIESDDRAFLSDRIEHFSPHYNFGDQVIGLKFINPDRYAAIQNVFPKLPGEEKKDKDAKLVNETADAIISTHEIRSLFLYHYLSKKPISAGDERRFIQVDTETFIKQYIDTIKLFFEDIKSGELQPIADPPNYQKNEPLPYVRGDKEKTQEERAQYRERQKEIKERRKELNTLLQNRYGLSIQYIPSRLREYLLGYKKVPYEKLALQKLRAQRKEVKKRIKDIEKMRTPRVGEQATWLAEDIVFLTPPKMHTPERKTTKHPQKLNNDQFRIMQSSLAYFSVNKKAIKKFFQKETGIGLSNRETSHPFLYRIDVGRCRGILDFYTGYLKYKMDWLDDAIKKVDNRKHGKKEAKKYEKYLPSSIQHKTPLELDYTRLPVYLPRGLFKKAIVKALAAHADFQVEPEEDNVIFCLDQLLDGDTQDFYNWQRYYRSALTEKETDNQLVLAHPYAEQILGTIKTLEGKQKNNKLGNKAKQKIKDELIDLKRAKRRLLDREQYLRAVQAEDRALWLMIQERQKQKAEHEEIAFDQLDLKNITKILTESIDARLRIPDTKVDITDKLPLRRYGDLRRVAKDRRLVNLASYYHVAGLSEIPYDLVKKELEEYDRRRVAFFEHVYQFEKEVYDRYAAELRNENPKGESTYFSHWEYVAVAVKHSADTHFNELFKEKVMQLRNKFHHNEFPYFDWLLPEVEKASAALYADRVFDVAEGYYQKMRKLMRQ

SEQ ID NO: 141 - protein, 1155 aa, Flavorbacterium sp.
MDNNITVEKTELGLGITYNHDKVEDKHYFGGFFNLAQNNIDLVAQEFKKRLLIQGKDSINIFANYFSDQCSITNLERGIKILAEYFPVVSYIDLDEKNKSKSIREHLILLLETINNLRNYYTHYYHKKIIIDGSLFPLLDTILLKVVLEIKKKKLKEDKTKQLLKKGLEKEMTILFNLMKAEQKEKKIKGWNIDENIKGAVLNRAFSHLLYNDELSDYRKSKYNTEDETLKDTLTESGILFLLSFFLNKKEQEQLKANIKGYKGKIASIPDEEITLKNNSLRNMATHWTYSHLTYKGLKHRIKTDHEKETLLVNMVDYLSKVPHEIYQNLSEQNKSLFLEDINEYMRDNEENHDSSEASRVIHPVIRKRYENKFAYFAIRFLDEFAEFPTLRFMVNVGNYIHDNRKKDIGGTSLITNRTIKQQINVFGNLTEIHKKKNDYFEKEENKEKTLEWELFPNPSYHFQKENIPIFIDLEKSKETNDLAKEYAKEKKKIFGSSRKKQQNTAKKNRETIINLVFDKYKTSDRKTVTFEQPTALLSFNELNSFLYAFLVENKTGKELEKIIIEKIANQYQILKNCSSTVDKTNDNIPKSIKKIVNTTTDSFYFEGKKIDIEKLEKDITIEIEKTNEKLETIKENEESAQNYKRNERNTQKRKLYRKYVFFTNEIGIEATWITNDILRFLDNKENWKGYQHSELQKFISQYDNYKKEALGLLESEWNLESDAFFGQNLKRMFQSNSTFETFYKKYLDNRKNTLETYLSAIENLKTMTDVRPKVLKKKWTELFRFFDKKIYLLSTIETKINELITKPINLSRGIFEEKPTFINGKNPNKENNQHLFANWFIYAKKQTILQDFYNLPLEQPKAITNLKKHKYKLERSINNLKIEDIYIKQMVDFLYQKLFEQSFIGSLQDLYTSKEKREIEKGKAKNEQTPDESFIWKKQVEINTHNGRIIAKTKIKDIGKFKNLLTDNKIAHLISYDDRIWDFSLNNDGDITKKLYSINTELESYETIRREKLLKQIQQFEQFLLEQETEYSAERKHPEKFEKDCNPNFKKYIIEGVLNKIIPNHEIEEIEILKSKEDVFKINFSDILILNNDNIKKGYLLIMIRNKFAHNQLIDKNLFNFSLQLYSKNENENFSEYLNKVCQNIIQEFKEKLK

SEQ ID NO: 142 - protein, 1175 aa, Porphyromonas gulae
MTEQSERPYNGTYYTLEDKHFWAAFLNLARHNAYITLTHIDRQLAYSKADITNDQDVLSFKALWKNFDNDLERKSRLRSLILKHFSFLEGAAYGKKLFESKSSGNKSSKNKELTKKEKEELQANALSLDNLKSILFDFLQKLKDFRNYYSHYRHSESSELPLFDGNMLQRLYNVFDVSVQRVKRDHEHNDKVDPHRHFNHLVRKGKKDRYGHNDNPSFKHHFVDSEGMVTEAGLLFFVSLFLEKRDAIWMQKKIRGFKGGTETYQQMTNEVFCRSRISLPKLKLESLRTDDWMLLDMLNELVRCPKPLYDRLREKDRARFRVPVDILPDEDDTDGGGEDPFKNTLVRHQDRFPYFALRYFDLKKVFTSLRFHIDLGTYHFAIYKKMIGEQPEDRHLTRNLYGFGRIQDFAEEHRPEEWKRLVRDLDYFETGDKPYISQTTPHYHIEKGKIGLRFMPEGQHLWPSPEVGTTRTGRSKYAQDKRLTAEAFLSVHELMPMMFYYFLLREKYSEEVSAEKVQGRIKRVIEDVYAIYDAFARDEINTLKELDACLADKGIRRGHLPKQMIAILSQEHKDMEEKIRKKLQEMIADTDHRLDMLDRQTDRKIRIGRKNAGLPKSGVIADWLVRDMMRFQPVAKDTSGKPLNNSKANSTEYRMLQRALALFGGEKKRLTPYFRQMNLTGGNNPHPFLHETRWESHTNILSFYRSYLRARKAFLERIGRSDRMENRPFLLLKEPKTDRQTLVAGWKSEFHLPRGIFTEAVRDCLIEMGYDEVGSYREVGFMAKAVPLYFERACEDRVQPFYDSPFNVGNSLKPKKGRFLSKEERAEEWERGKERFRDLEAWSHSAARRIEDAFAGIEYASPGNKKKIEQLLRDLSLWEAFESKLKVRADKINLAKLKKEILEAQEHPYHDFKSWQKFERELRLVKNQDIITWMMCRDLMEENKVEGLDTGTLYLKDIRPNVQEQGSLNVLNRVKPMRLPVVVYRADSRGHVHKEEAPLATVYIEERDTKLLKQGNFKSFVKDRRLNGLFSFVDTGGLAMEQYPISKLRVEYELAKYQTARVCVFELTLRLEESLLTRYPHLPDESFRKMLESWSDPLLAKWPELHGKVRLLIAVRNAFSHNQYPMYDEAVFSSIRKYDPSSPDAIEERMGLNIAHRLSEEVKQAKETVERIIQV

SEQ ID NO: 143 - protein, 1145 aa, Chryseobacterium sp.
METQTIGHGIAYDHSKIQDKHFFGGFLNLAENNIKAVLKAFSEKFNVGNVDVKQFADVSLKDNLPDNDFQKRVSFLKMYFPVVDFINIPNNRAKFRSDLTTLFKSVDQLRNFYTHYYHKPLDFDASLFILLDDIFARTAKEVRDQKMKDDKTRQLLSKSLSEELQKGYELQLERLKELNRLGKKVNIHDQLGIKNGVLNNAFNHLIYKDGESFKTKLTYSSALTSFESAENGIEISQSGLLFLLSMFLKRKEIEDLKNRNKGFKAKVVIDEDGKVNGLKFMATHWVFSYLCFKGLKSKLSTEFHEETLLIQIIDELSKVPDELYCAFDKETRDKFIEDINEYVKEGHQDFSLEDAKVIHPVIRKRYENKFNYFAIRFLDEFVKFPSLRFQVHVGNYVHDRRIKNIDGTTFETERVVKDRIKVFGRLSEISSYKAQYLSSVSDKHDETGWEIFPNPSYVFINNNIPIHISVDTSFKKEIADFKKLRRAQVPDELKIRGAEKKRKFEITQMIGSKSVLNQEEPIALLSLNEIPALLYEILINGKEPAEIERIIKDKLNERQDVIKNYNPENWLPASQISRRLRSNKGERIINTDKLLQLVTKELLVTEQKLKIISDNREALKQKKEGKYIRKFIFTNSELGREAIWLADDIKRFMPADVRKEWKGYQHSQLQQSLAFYNSRPKEALAILESSWNLKDEKIIWNEWILKSFTQNKFFDAFYNEYLKGRKKYFAFLSEHIVQYTSNAKNLQKFIKQQMPKDLFEKRHYIIEDLQTEKNKILSKPFIFPRGIFDKKPTFIKGVKVEDSPESFANWYQYGYQKDHQFQKFYDWKRDYSDVFLEHLGKPFINNGDRRTLGMEELKERIIIKQDLKIKKIKIQDLFLRLIAENLFQKVFKYSAKLPLSDFYLTQEERMEKENMAALQNVREEGDKSPNIIKDNFIWSKMIPYKKGQIIENAVKLKDIGKLNVLSLDDKVQTLLSYDDAKPWSKIALENEFSIGENSYEVIRREKLFKEIQQFESEILFRSGWDGINHPAQLEDNRNPKFKMYIVNGILRKSAGLYSQGEDIWFEYNADFNNLDADVLETKSELVQLAFLVTAIRNKFAHNQLPAKEFYFYIRAKYGFADEPSVALVYLNFTKYAINEFKKVMI

SEQ ID NO: 144 - protein, 948 aa, Riemerella anatipestifer
MFFSFHNAQRVIFKHLYKAFDASLRMVKEDYKAHFTVNLTRDFAHLNRKGKNKQDNPDFNRYRFEKDGFFTESGLLFFTNLFLDKRDAYWMLKKVSGFKASHKQREKMTTEVFCRSRILLPKLRLESRYDHNQMLLDMLSELSRCPKLLYEKLSEENKKHFQVEADGFLDEIEEEQNPFKDTLIRHQDRFPYFALRYLDLNESFKSIRFQVDLGTYHYCIYDKKIGDEQEKRHLTRTLLSFGRLQDFTEINRPQEWKALTKDLDYKETSNQPFISKTTPHYHITDNKIGFRLGTSKELYPSLEIKDGANRIAKYPYNSGFVAHAFISVHELLPLMFYQHLTGKSEDLLKETVRHIQRIYKDFEEERINTIEDLEKANQGRLPLGAFPKQMLGLLQNKQPDLSEKAKIKIEKLIAETKLLSHRLNTKLKSSPKLGKRREKLIKTGVLADWLVKDFMRFQPVAYDAQNQPIKSSKANSTEFWFIRRALALYGGEKNRLEGYFKQTNLIGNTNPHPFLNKFNWKACRNLVDFYQQYLEQREKFLEAIKNQPWEPYQYCLLLKIPKENRKNLVKGWEQGGISLPRGLFTEAIRETLSEDLMLSKPIRKEIKKHGRVGFISRAITLYFKEKYQDKHQSFYNLSYKLEAKAPLLKREEHYEYWQQNKPQSPTESQRLELHTSDRWKDYLLYKRWQHLEKKLRLYRNQDVMLWLMTLELTKNHFKELNLNYHQLKLENLAVNVQEADAKLNPLNQTLPMVLPVKVYPATAFGEVQYHKTPIRTVYIREEHTKALKMGNFKALVKDRRLNGLFSFIKEENDTQKHPISQLRLRRELEIYQSLRVDAFKETLSLEEKLLNKHTSLSSLENEFRALLEEWKKEYAASSMVTDEHIAFIASVRNAFCHNQYPFYKEALHAPIPLFTVAQPTTEEKDGLGIAEALLKVLREYCEIVKSQI

SEQ ID NO: 145 - protein, 1175 aa, Porhyromonas gingivalis
MTEQNEKPYNGTYYTLEDKHFWAAFFNLARHNAYITLAHIDRQLAYSKADITNDEDILFFKGQWKNLDNDLERKARLRSLILKHFSFLEGAAYGKKLFESQSSGNKSSKKKELTKKEKEELQANALSLDNLKSILFDFLQKLKDFRNYYSHYRHPESSELPLFDGNMLQRLYNVFDVSVQRVKRDHEHNDKVDPHRHFNHLVRKGKKDKYGNNDNPFFKHHFVDREEKVTEAGLLFFVSLFLEKRDAIWMQKKIRGFKGGTEAYQQMTNEVFCRSRISLPKLKLESLRTDDWMLLDMLNELVRCPKLLYDRLREEDRARFRVPVDILSDEDDTDGTEEDPFKNTLVRHQDRFPYFALRYFDLKKVFTSLRFHIDLGTYHFAIYKKNIGEQPEDRHLTRNLYGFGRIQDFAEEHRPEEWKRLVRDLDYFETGDKPYITQTTPHYHIEKGKIGLRFVPEGQLLWPSPEVGATRTGRSKYAQDKRFTAEAFLSVHELMPMMFYYFLLREKYSEEASAEKVQGRIKRVIEDVYAVYDAFARDEINTRDELDACLADKGIRRGHLPRQMIAILSQEHKDMEEKVRKKLQEMIADTDHRLDMLDRQTDRKIRIGRKNAGLPKSGVIADWLVRDMMRFQPVAKDTSGKPLNNSKANSTEYRMLQRALALFGGEKERLTPYFRQMNLTGGNNPHPFLHETRWESHTNILSFYRSYLKARKAFLQSIGRSDREENHRFLLLKEPKTDRQTLVAGWKSEFHLPRGIFTEAVRDCLIEMGYDEVGSYKEVGFMAKAVPLYFERACKDRVQPFYDYPFNVGNSLKPKKGRFLSKEKRAEEWESGKERFRDLEAWSHSAARRIEDAFVGIEYASWENKKKIEQLLQDLSLWETFESKLKVKADKINIAKLKKEILEAKEHPYHDFKSWQKFERELRLVKNQDIITWMMCRDLMEENKVEGLDTGTLYLKDIRTDVQEQGSLNVLNHVKPMRLPVVVYRADSRGHVHKEEAPLATVYIEERDTKLLKQGNFKSFVKDRRLNGLFSFVDTGALAMEQYPISKLRVEYELAKYQTARVCAFEQTLELEESLLTRYPHLPDESFREMLESWSDPLLDKWPDLQREVRLLIAVRNAFSHNQYPMYDETIFSSIRKYDPSSLDAIEERMGLNIAHRLSEEVKLAKEMVERIIQA

SEQ ID NO: 146 - protein, 1175 aa, Porphyromonas gingivalis
MTEQNEKPYNGTYYTLKDKHFWAAFFNLARHNAYITLTHIDRQLAYSKADITNDEDILFFKGQWKNLDNDLERKARLRSLILKHFSFLEGAAYGKKLFESQSSGNKSSKKKELTKKEKEELQANALSLDNLKSILFDFLQKLKDFRNYYSHYRHPESSELPMFDGNMLQRLYNVFDVSVQRVKRDHEHNDKVDPHRHFNHLVRKGKKDRCGNNDNPFFKHHFVDREGKVTEAGLLFFVSLFLEKRDAIWMQKKIRGFKGGTETYQQMTNEVFCRSRISLPKLKLESLRTDDWMLLDMLNELVRCPKSLYDRLREEDRACFRVPVDILSDEDDTDGAEEDPFKNTLVRHQDRFPYFALRYFDLKKVFTSLRFHIDLGTYHFAIYKKNIGEQPEDRHLTRNLYGFGRIQDFAEEHRPEEWKRLVRDLDCFETGDKPYITQTTPHYHIEKGKIGLRFVPEGQHLWPSPEVGATRTGRSKYAQDKRFTAEAFLSVHELMPMMFYYFLLREKYSEEVSAERVQGRIKRVIEDVYAVYDAFARDEINTRDELDACLADKGIRRGHLPRQMIAILSQKHKDMEEKVRKKLQEMIADTDHRLDMLDRQTDRKIRIGRKNAGLPKSGVIADWLVRDMMRFQPVAKDTSGKPLNNSKANSTEYRMLQRALALFGGEKERLTPYFRQMNLTGGNNPHPFLHETRWESHTNILSFYRSYLKARKAFLQSIGRSDRVENHRFLLLKEPKTDRQTLVAGWKGEFHLPRGIFTEAVRDCLIEMGLDEVGSYKEVGFMAKAVPLYFERACKDRVQPFYDYPFNVGNSLKPKKGRFLSKEKRAEEWESGKERFRDLEAWSHSAARRIEDAFAGIENASRENKKKIEQLLQDLSLWETFESKLKVKADKINIAKLKKEILEAKEHPYLDFKSWQKFERELRLVKNQDIITWMMCRDLMEENKVEGLDTGTLYLKDIRTDVQEQGSLNVLNHVKPMRLPVVVYRADSRGHVHKEQAPLATVYIEERDTKLLKQGNFKSFVKDRRLNGLFSFVDTGALAMEQYPISKLRVEYELAKYQTARVCAFEQTLELEESLLTRYPHLPDENFRKMLESWSDPLLDKWPDLHRKVRLLIAVRNAFSHNQYPMYDEAVFSSIRKYDPSSPDAIEERMGLNIAHRLSEEVKQAKEMAERIIQA

SEQ ID NO: 147 - protein, 1213 aa, Flavobacterium colunare
MSSKNESYNKQKTFNHYKQEDKYFFGGFLNNADDNLRQVGKEFKTRINFNHNNNELASVFKDYFNKEKSVAKREHALNLLSNYFPVLERIQKHTNHNFEQTREIFELLLDTIKKLRDYYTHHYHKPITINPKVYDFLDDTLLDVLITIKKKKVKNDTSRELLKEKFRPELTQLKNQKREELIKKGKKLLEENLENAVFNHCLRPFLEENKTDDKQNKTVSLRKYRKSKPNEETSITLTQSGLVFLISFFLHRKEFQVFTSGLEGFKAKVNTIKEEEISLNKNNIVYMITHWSYSYYNFKGLKHRIKTDQGVSTLEQNNTTHSLTNTNTKEALLTQIVDYLSKVPNEIYETLSEKQQKEFEEDINEYMRENPENEDSTFSSIVSHKVIRKRYENKFNYFAMRFLDEYAELPTLRFMVNFGDYIKDRQKKILESIQFDSERIIKKEIHLFEKLGLVTEYKKNVYLKETSNIDLSRFPLFPSPSYVMANNNIPFYIDSRSNNLDEYLNQKKKAQSQNRKRNLTFEKYNKEQSKDAIIAMLQKEIGVKDLQQRSTIGLLSCNELPSMLYEVIVKDIKGAELENKIAQKIREQYQSIRDFTLDSPQKDNIPTTLTKTISTDTSVTFENQPIDIPRLKNALQKELTLTQEKLLNVKQHEIEVDNYNRNKNTYKFKNQPKDKVDDNKLQRKYVFYRNEIGQEANWLASDLIHFMKNKSLWKGYMHNELQSFLAFFEDKKNDCIALLETVFNLKEDCILTKDLKNLFLKHGNFIDFYKEYLKLKEDFLNTESTFLENGFIGLPPKILKKELSKRLNYIFIVFQKRQFIIKELEEKKNNLYADAINLSRGIFDEKPTMIPFKKPNPDEFASWFVASYQYNNYQSFYELTPDKIENDKKKKYKNLRAINKVKIQDYYLKLMVDTLYQDLFNQPLDKSLSDFYVSKTDREKIKADAKAYQKRNDSFLWNKVIHLSLQNNRITANPKLKDIGKYKRALQDEKIATLLTYDDRTWTYALQKPEKENENDYKELHYTALNMELQEYEKVRSKKLLKQVQELEKQILDKFYDFSNNATHPEDLEIEDKKGKRHPNFKLYITKALLKNESEIINLENIDIEILIKYYDYNTEKLKEKIKNMDEDEKAKIVNTKENYNKITNVLIKKALVLIIIRNKMAHNQYPPKFIYDLATRFVPKKEEEYFACYFNRVFETITTELWENKKKAKEIV

SEQ ID NO: 148 - protein, 1119 aa, Porphyromonas gingivalis
MTEQNERPYNGTYYTLEDKHFWAAFFNLARHNAYITLTHIDRQLAYSKADITNDEDILFFKGQWKNLDNDLERKARLRSLILKHFSFLEGAAYGKKLFENKSSGNKSSKKKELTKKEKEELQANALSLDNLKSILFDFLQKLKDFRNYYSHYRHPESSELPLFDGNMLQRLYNVFDVSVQRVKRDHEHNDKVDPHRHFNHLVRKGKKDRCGNNDNPFFKHHFVDREGKVTEAGLLFFVSLFLEKRDAIWMQKKIRGFKGGTEAYQQMTNEVFCRSRISLPKLKLESLRTDDWMLLDMLNELVRCPKSLYDRLREEDRARFRVPVDILSDEDDTDGTEEDPFKNTLVRHQDRFPYFALRYFDLKKVFTSLRFHIDLGTYHFAIYKKNIGEQPEDRHLTRNLYGFGRIQDFAEEHRPEEWKRLVRDLDYFETGDKPYITQTTPHYHIEKGKIGLRFVPEGQHLWPSPEVGATRTGRSKYAQDKRLTAEAFLSVHELMPMMFYYFLLREKYSEEVSAEKVQGRIKRVIEDVYAVYDAFARGEIDTLDRLDACLADKGIRRGHLPRQMIAILSQEHKDMEEKVRKKLQEMIADTDHRLDMLDRQTDRKIRIGRKNAGLPKSGVIADWLVRDMMRFQPVAKDTSGKPLNNSKANSTEYRMLQRALALFGGEKERLTPYFRQMNLTGGNNPHPFLHETRWESHTNILSFYRSYLKARKAFLQSIGRSDREENHRFLLLKEPKTDRQTLVAGWKSEFHLPRGIFTEAVRDCLIEMGYDEVGSYKEVGFMAKAVPLYFERACKDRVQPFYDYPFNVGNSLKPKKGRFLSKEKRAEEWESGKERFRLAKLKKEILEAKEHPYLDFKSWQKFERELRLVKNQDIITWMMCRDLMEENKVEGLDTGTLYLKDIRTEVQEQGSLNVLNRVKPMRLPVVVYRADSRGHVHKEQAPLATVYIEERDTKLLKQGNFKSFVKDRRLNGLFSFVDTGGLAMEQYPISKLRVEYELAKYQTARVCAFEQTLELEESLLTRCPHLPDKNFRKMLESWSDPLLDKWPDLQREVWLLIAVRNAFSHNQYPMYDEAVFSSIRKYDPSSPDAIEERMGLNIAHRLSEEVKQAKEMAERIIQA

SEQ ID NO: 149 - protein, 1135 aa, Porphyromonas gingivalis
MNTVPASENKGQSRTVEDDPQYFGLYLNLARENLIEVESHVRIKFGKKKLNEESLKQSLLCDHLLSVDRWTKVYGHSRRYLPFLHYFDPDSQIEKDHDSKTGVDPDSAQRLIRELYSLLDFLRNDFSHNRLDGTTFEHLEVSPDISSFITGTYSLACGRAQSRFADFFKPDDFVLAKNRKEQLISVADGKECLTVSGLAFFICLFLDREQASGMLSRIRGFKRTDENWARAVHETFCDLCIRHPHDRLESSNTKEALLLDMLNELNRCPRILYDMLPEEERAQFLPALDENSMNNLSENSLNEESRLLWDGSSDWAEALTKRIRHQDRFPYLMLRFIEEMDLLKGIRFRVDLGEIELDSYSKKVGRNGEYDRTITDHALAFGKLSDFQNEEEVSRMISGEASYPVRFSLFAPRYAIYDNKIGYCHTSDPVYPKSKTGEKRALSNPQSMGFISVHDLRKLLLMELLCEGSFSRMQSGFLRKANRILDETAEGKLQFSALFPEMRHRFIPPQNPKSKDRREKAETTLEKYKQEIKGRKDKLNSQLLSAFDMNQRQLPSRLLDEWMNIRPASHSVKLRTYVKQLNEDCRLRLRKFRKDGDGKARAIPLVGEMATFLSQDIVRMIISEETKKLITSAYYNEMQRSLAQYAGEENRRQFRAIVAELHLLDPSSGHPFLSATMETAHRYTEDFYKCYLEKKREWLAKTFYRPEQDENTKRRISVFFVPDGEARKLLPLLIRRRMKEQNDLQDWIRNKQAHPIDLPSHLFDSKIMELLKVKDGKKKWNEAFKDWWSTKYPDGMQPFYGLRRELNIHGKSVSYIPSDGKKFADCYTHLMEKTVQDKKRELRTAGKPVPPDLAADIKRSFHRAVNEREFMLRLVQEDDRLMLMAINKMMTDREEDILPGLKNIDSILDKENQFSLAVHAKVLEKEGEGGDNSLSLVPATIEIKSKRKDWSKYIRYRYDRRVPGLMSHFPEHKATLDEVKTLLGEYDRCRIKIFDWAFALEGAIMSDRDLKPYLHESSSREGKSGEHSTLVKMLVEKKGCLTPDESQYLILIRNKAAHNQFPCAAEMPLIYRDVSAKVGSIEGSSAKDLPEGSSLVDSLWKKYEMIIRKILPILDPENRFFGKLLNNMSQPINDL

SEQ ID NO: 150 - protein, 950 aa, Riemerella anatipestifer
MFFSFHNAQRVIFKHLYKAFDASLRMVKEDYKAHFTVNLTRDFAHLNRKGKNKQDNPDFNRYRFEKDGFFTESGLLFFTNLFLDKRDAYWMLKKVSGFKASHKQSEKMTTEVFCRSRILLPKLRLESRYDHNQMLLDMLSELSRCPKLLYEKLSEKDKKCFQVEADGFLDEIEEEQNPFKDTLIRHQDRFPYFALRYLDLNESFKSIRFQVDLGTYHYCIYDKKIGYEQEKRHLTRTLLNFGRLQDFTEINRPQEWKALTKDLDYNETSNQPFISKTTPHYHITDNKIGFRLRTSKELYPSLEVKDGANRIAKYPYNSDFVAHAFISISVHELLPLMFYQHLTGKSEDLLKETVRHIQRIYKDFEEERINTIEDLEKANQGRLPLGAFPKQMLGLLQNKQPDLSEKAKIKIEKLIAETKLLSHRLNTKLKSSPKLGKRREKLIKTGVLADWLVKDFMRFQPVVYDAQNQPIKSSKANSTESRLIRRALALYGGEKNRLEGYFKQTNLIGNTNPHPFLNKFNWKACRNLVDFYQQYLEQREKFLEAIKHQPWEPYQYCLLLKVPKENRKNLVKGWEQGGISLPRGLFTEAIRETLSKDLTLSKPIRKEIKKHGRVGFISRAITLYFKEKYQDKHQSFYNLSYKLEAKAPLLKKEEHYEYWQQNKPQSPTESQRLELHTSDRWKDYLLYKRWQHLEKKLRLYRNQDIMLWLMTLELTKNHFKELNLNYHQLKLENLAVNVQEADAKLNPLNQTLPMVLPVKVYPTTAFGEVQYHETPIRTVYIREEQTKALKMGNFKALVKDRHLNGLFSFIKEENDTQKHPISQLRLRRELEIYQSLRVDAFKETLSLEEKLLNKHASLSSLENEFRTLLEEWKKKYAASSMVTDKHIAFIASVRNAFCHNQYPFYKETLHAPILLFTVAQPTTEEKDGLGIAEALLRVLREYCEIVKSQI

SEQ ID NO: 151 - protein, 1213 aa, Flavobacterium columnare
MSSKNESYNKQKTFNHYKQEDKYFFGGFLNNADDNLRQVGKEFKTRINFNHNNNELASVFKDYFNKEKSVAKREHALNLLSNYFPVLERIQKHTNHNFEQTREIFELLLDTIKKLRDYYTHHYHKPITINPKIYDFLDDTLLDVLITIKKKKVKNDTSRELLKEKLRPELTQLKNQKREELIKKGKKLLEENLENAVFNHCLRPFLEENKTDDKQNKTVSLRKYRKSKPNEETSITLTQSGLVFLMSFFLHRKEFQVFTSGLEGFKAKVNTIKEEKISLNKNNIVYMITHWSYSYYNFKGLKHRIKTDQGVSTLEQNNTTHSLTNTNTKEALLTQIVDYLSKVPNEIYETLSEKQQKEFEEDINEYMRENPENEDSTFSSIVSHKVIRKRYENKFNYFAMRFLDEYAELPTLRFMVNFGDYIKDRQKKILESIQFDSERIIKKEIHLFEKLGLVTEYKKNVYLKETSNIDLSRFPLFPSPSYVMANNNIPFYIDSRSNNLDEYLNQKKKAQSQNRKRNLTFEKYNKEQSKDAIIAMLQKEIGVKDLQQRSTIGLLSCNELPSMLYEVIVKDIKGAELENKIAQKIREQYQSIRDFTLNSPQKDNIPTTLIKTISTDTSVTFENQPIDIPRLKNAIQKELALTQEKLLNVKQHEIEVNNYNRNKNTYKFKNQPKDKVDDNKLQRKYVFYRNEIGQEANWLASDLIHFMKNKSLWKGYMHNELQSFLAFFEDKKNDCIALLETVFNLKEDCILTKDLKNLFLKHGNFIDFYKEYLKLKEDFLNTESTFLENGFIGLPPKILKKELSKRLNYIFIVFQKRQFIIKELEEKKNNLYADAINLSRGIFDEKPTMIPFKKPNPDEFASWFVASYQYNNYQSFYELTPDKIENDKKKKYKNLRAINKVKIQDYYLKLMVDTLYQDLFNQPLDKSLSDFYVSKTDREKIKADAKAYQKRNDSFLWNKVIHLSLQNNRITANPKLKDIGKYKRALQDEKIATLLTYDDRTWTYALQKPEKENENDYKELHYTALNMELQEYEKVRSKKLLKQVQELEKQILDKFYDFSNNATHPEDLEIEDKKGKRHPNFKLYITKALLKNESEIINLENIDIEILIKYYDYNTEKLKEKIKNMDEDEKAKIVNTKENYNKITNVLIKKALVLIIIRNKMAHNQYPPKFIYDLATRFVPKKEEEYFACYFNRVFETITTELWENKKKAKEIV

SEQ ID NO: 152 - protein, 1095 aa, Riemerella anatipestifer
MEKPLPPNVYTLKHKFFWGAFLNIARHNAFITICHINEQLGLTTPPNDDKIADVVCGTWNNILNNDHDLLKKSQLTELILKHFPFLAAMCYHPPKKEGKKKGSQKEQQKEKENEAQSQAEALNPSELIKVLKTLVKQLRTLRNYYSHHSHKKPDAEKDIFKHLYKAFDASLRMVKEDYKAHFTVNLTQDFAHLNRKGKNKQDNPDFDRYRFEKDGFFTESGLLFFTNLFLDKRDAYWMLKKVSGFKASHKQSEKMTTEVFCRSRILLPKLRLESRYDHNQMLLDMLSELSRYPKLLYEKLSEEDKKRFQVEADGFLDEIEEEQNPFKDTLIRHQDRFPYFALRYLDLNESFKSIRFQVDLGTYHYCIYDKKIGDEQEKRHLTRTLLSFGRLQDFTEINRPQEWKALTKDLDYKETSKQPFISKTTPHYHITDNKIGFRLGTSKELYPSLEVKDGANRIAQYPYNSDFVAHAFISVHELLPLMFYQHLTGKSEDLLKETVRHIQRIYKDFEEERINTIEDLEKANQGRLPLGAFPKQMLGLLQNKQPDLSEKAKIKIEKLIAETKLLSHRLNTKLKSSPKLGKRREKLIKTGVLADWLVKDFMRFQPVAYDAQNQPIESSKANSTEFQLIQRALALYGGEKNRLEGYFKQTNLIGNTNPHPFLNKFNWKACRNLVDFYQQYLEQREKFLEAIKNQPWEPYQYCLLLKIPKENRKNLVKGWEQGGISLPRGLFTEAIRETLSKDLTLSKPIRKEIKKHGRVGFISRAITLYFREKYQDDHQSFYDLPYKLEAKASPLPKKEHYEYWQQNKPQSPTELQRLELHTSDRWKDYLLYKRWQHLEKKLRLYRNQDVMLWLMTLELTKNHFKELNLNYHQLKLENLAVNVQEADAKLNPLNQTLPMVLPVKVYPATAFGEVQYQETPIRTVYIREEQTKALKMGNFKALVKDRRLNGLFSFIKEENDTQKHPISQLRLRRELEIYQSLRVDAFKETLNLEEKLLKKHTSLSSVENKFRILLEEWKKEYAASSMVTDEHIAFIASVRNAFCHNQYPFYEEALHAPIPLFTVAQQTTEEKDGLGIAEALLRVLREYCEIVKSQI

SEQ ID NO: 153 - protein, 1149 aa, Sinomicrobium oceani
MESTTTLGLHLKYQHDLFEDKHYFGGGVNLAVQNIESIFQAFAERYGIQNPLRKNGVPAINNIFHDNISISNYKEYLKFLKQYLPVVGFLEKSNEINIFEFREDFEILINAIYKLRHFYTHYYHSPIKLEDRFYTCLNELFVAVAIQVKKHKMKSDKTRQLLNKNLHQLLQQLIEQKREKLKDKKAEGEKVSLDTKSIENAVLNDAFVHLLDKDENIRLNYSSRLSEDIITKNGITLSISGLLFLLSLFLQRKEAEDLRSRIEGFKGKGNELRFMATHWVFSYLNVKRIKHRLNTDFQKETLLIQIADELSKVPDEVYKTLDHENRSKFLEDINEYIREGNEDASLNESTVVHGVIRKRYENKFHYLVLRYLDEFVDFPSLRFQVHLGNYIHDRRDKVIDGTNFITNRVIKEPIKVFGKLSHVSKLKSDYMESLSREHKNGWDVFPNPSYNFVGHNIPIFINLRSASSKGKELYRDLMKIKSEKKKKSREEGIPMERRDGKPTKIEISNQIDRNIKDNNFKDIYPGEPLAMLSLNELPALLFELLRRPSITPQDIEDRMVEKLYERFQIIRDYKPGDGLSTSKISKKLRKADNSTRLDGKKLLRAIQTETRNAREKLHTLEENKALQKNRKRRTVYTTREQGREASWLAQDLKRFMPIASRKEWRGYHHSQLQQILAFYDQNPKQPLELLEQFWDLKEDTYVWNSWIHKSLSQHNGFVPMYEGYLKGRLGYYKKLESDIIGFLEEHKVLKRYYTQQHLNVIFRERLYFIKTETKQKLELLARPLVFPRGIFDDKPTFVQDKKVVDHPELFADWYVYSYKDDHSFQEFYHYKRDYNEIFETELSWDIDFKDNKRQLNPSEQMDLFRMKWDLKIKKIKIQDIFLKIVAEDIYLKIFGHKIPLSLSDFYISRQERLTLDEQAVAQSMRLPGDTSENQIKESNLWQTTVPYEKEQIREPKIKLKDIGKFKYFLQQQKVLNLLKYDPQHVWTKAELEEELYIGKHSYEVVRREMLLQKCHQLEKHILEQFRFDGSNHPRELEQGNHPNFKMYIVNGILTKRGELEIEAENWWLELGNSKNSLDKVEVELLTMKTIPEQKAFLLILIRNKFAHNQLPADNYFHYASNLMNLKKSDTYSLFWFTVADTIVQEFMSL

SEQ ID NO: 154 - protein, 1133 aa, Reichenbachiella agariperforans
MKTNPLIASSGEKPNYKKFNTESDKSFKKIFQNKGSIAPIAEKACKNFEIKSKSPVNRDGRLHYFSVGHAFKNIDSKNVFRYELDESQMDMKPTQFLALQKEFFDFQGALNGLLKHIRNVNSHYVHTFEKLEIQSINQKLITFLIEAFELAVIHSYLNEEELSYEAYKDDPQSGQKLVQFLCDKFYPNKEHEVEERKTILAKNKRQALEHLLFIEVTSDIDWKLFEKHKVFTISNGKYLSFHACLFLLSLFLYKSEANQLISKIKGFKRNDDNQYRSKRQIFTFFSKKFTSQDVNSEEQHLVKFRDVIQYLNHYPSAWNKHLELKSGYPQMTDKLMRYIVEAEIYRSFPDQTDNHRFLLFAIREFFGQSCLDTWTGNTPINFSNQEQKGFSYEINTSAEIKDIETKLKALVLKGPLNFKEKKEQNRLEKDLRREKKEQPTNRVKEKLLTRIQHNMLYVSYGRNQDRFMDFAARFLAETDYFGKDAKFKMYQFYTSDEQRDHLKEQKKELPKKEFEKLKYHQSKLVDYFTYAEQQARYPDWDTPFVVENNAIQIKVTLFNGAKKIVSVQRNLMLYLLEDALYSEKRENAGKGLISGYFVHHQKELKDQLDILEKETEISREQKREFKKLLPKRLLHRYSPAQINDTTEWNPMEVILEEAKAQEQRYQLLLEKAILHQTEEDFLKRNKGKQFKLRFVRKAWHLMYLKELYMNKVAEHGHHKSFHITKEEFNDFCRWMFAFDEVPKYKEYLCDYFSQKGFFNNAEFKDLIESSTSLNDLYEKTKQRFEGWSKDLTKQSDENKYLLANYESMLKDDMLYVNISHFISYLESKGKINRNAHGHIAYKALNNVPHLIEEYYYKDRLAPEEYKSHGKLYNKLKTVKLEDALLYEMAMHYLSLEPALVPKVKTKVKDILSSNIAFDIKDAAGHHLYHLLIPFHKIDSFVALINHQSQQEKDPDKTSFLAKIQPYLEKVKNSKDLKAVYHYYKDTPHTLRYEDLNMIHSHIVSQSVQFTKVALKLEEYFIAKKSITLQIARQISYSEIADLSNYFTDEVRNTAFHFDVPETAYSMILQGIESEFLDREIKPQKPKSLSELSTQQVSVCTAFLETLHNNLFDRKDDKKERLSKARERYFEQIN

SEQ ID NO: 155 - protein, 1115 aa, Fusobacterium necrophorum
MEKFRRQNRNSIIKIIISNYDTKGIKELKVRYRKQAQLDTFIIKTEIVNNDIFIKSIIEKAREKYRYSFLFDGEEKYHFKNKSSVEIVKKDIFSQTPDNMIRNYKITLKISEKNPRVVEAEIEDLMNSTILKDGRRSARREKSMTERKLIEEKVAKNYSLLANCPMEEVDSIKIYKIKRFLTYRSNMLLYFASINSFLCEGIKGKDNETEEIWHLKDNDVRKEKVRENFKNKLIQSTENYNSSLKNQIEEKEKLLRKEFKKGAFYRTIIKKLQQERIKELSEKSLTEDCEKIIKLYSKLRHSLMHYDYQYFENLFENKKNDDLMKDLNLDLFKSLPLIRKMKLNNKVNYLEDGDTLFVLQKTKKAKTLYQIYDALCEQKNGFNKFINDFFVSDGEENTVFKQIINEKFQSEMEFLEKRISESEKKNEKLKKKLDSMKAHFRNINSEDTKEAYFWDIHSSRNYKTKYNERKNLVNEYTELLGSSKEKKLLREEITKINRQLLKLKQEMEEITKKNSLFRLEYKMKIAFGFLFCEFDGNISKFKDEFDASNQEKIIQYHKNGEKYLTSFLKEEEKEKFNLEKMQKIIQKTEEEDWLLPETKNNLFKFYLLTYLLLPYELKGDFLGFVKKHYYDIKNVDFIDENQNNIQVSQTVEKQEDYFYHKIRLFEKNTKKYEIVKYSIVPNEKLKQYFEDLGIDIKYLTVEQKSEVSEEKNKKVSLKNNGMFNKTILLFVFKYYQIAFKLFNDIELYSLFFLREKSGKPLEIFRKELESKMKDGYLNFGQLLYVVYEVLVKNKDLDKILSKKIDYRKDKSFSPEIAYLRNFLSHLNYSKFLDNFMKINTNKSDENKEVLIPSIKIQKMIQFIEKCNLQNQIDFDFNFVNDFYMRKEKMFFIQLKQIFPDINSTEKQKMNEKEEILRNRYHLTDKKNEQIKDEHEAQSQLYEKILSLQKIYSSDKNNFYGRLKEEKLLFLEKQGKKKLSMEEIKDKIAGDISDLLGILKKEITRDIKDKLTEKFRYCEEKLLNLSFYNHQDKKKEESIRVFLIRDKNSDNFKFESILDDGSNKIFISKNGKEITIQCCDKVLETLIIEKNTLKISSNGKIISLIPHYSYSIDVKY

SEQ ID NO: 156 - protein, 1111 aa, Fusobacterium necrophorum
MEKFRRQNRSSIIKIIISNYDTKGIKELKVRYRKQAQLDTFIIKTEIVNNDIFIKSIIEKAREKYRYSFLFDGEEKYHFKNKSSVEIVKKDIFSQTPDNMIRNYKITLKISEKNPRVVEAEIEDLMNSTILKDGRRSARREKSMTERKLIEEKVAENYSLLANCPMEEVDSIKIYKIKRFLTYRSNMLLYFASINSFLCEGIKGKDNETEEIWHLKDNDVRKEKVKENFKNKLIQSTENYNSSLKNQIEEKEKLLRKESKKGAFYRTIIKKLQQERIKELSEKSLTEDCEKIIKLYSELRHPLMHYDYQYFENLFENKENSELTKNLNLDIFKSLPLVRKMKLNNKVNYLEDNDTLFVLQKTKKAKTLYQIYDALCEQKNGFNKFINDFFVSDGEENTVFKQIINEKFQSEIEFLEKRISESEKKNEKLKKKLDSMKAHFRNINSEDTKEAYFWDIHSSRNYKTKYNERKNLVNEYTELLGSSKEKKLLREEITKINRQLLKLKQEMEEITKKNSLFRLEYKMKMAFGFLFCEFDGNISRFKDEFDASNQEKIIQYHKNGEKYLTYFLKEEEKEKFNLKKLQETIQKTGEENWLLPQNKNNLFKFYLLTYLLLPYELKGDFLGFVKKHYYDIKNVDFMDENQSSKIIESKEDDFYHKIRLFEKNTKKYEIVKYSIVPDKKLKQYFKDLGIDTKYLILDQKSEVSGEKNKKVSLKNNGMFNKTILLFVFKYYQIAFKLFNDIELYSLFFLREKSGKPFEVFLKELKDKMIGKQLNFGQLLYVVYEVLVKNKDLSEILSERIDYRKDMCFSAEIADLRNFLSHLNYSKFLDNFMKINTNKSDENKEVLIPSIKIQKMIKFIEECNLQSQIDFDFNFVNDFYMRKEKMFFIQLKQIFPDINSTEKQKMNEKEEILRNRYHLTDKKNEQIKDEHEAQSQLYEKILSLQKIYSSDKNNFYGRLKEEKLLFLEKQEKKKLSMEEIKDKIAGDISDLLGILKKEITRDIKDKLTEKFRYCEEKLLNLSFYNHQDKKKEESIRVFLIRDKNSDNFKFESILDDGSNKIFISKNGKEITIQCCDKVLETLIIEKNTLKISSNGKIISLIPHYSYSIDVKY

SEQ ID NO: 157 - protein, 1110 aa, Fusobacterium necrophorum
MKVRYRKQAQLDTFIIKTEIVNNDIFIKSIIEKAREKYRYSFLFDGEEKYHFKNKSSVEIVKNDIFSQTPDNMIRNYKITLKISEKNPRVVEAEIEDLMNSTILKDGRRSARREKSMTERKLIEEKVAENYSLLANCPIEEVDSIKIYKIKRFLTYRSNMLLYFASINSFLCEGIKGKDNETEEIWHLKDNDVRKEKVKENFKNKLIQSTENYNSSLKNQIEEKEKLSSKEFKKGAFYRTIIKKLQQERIKELSEKSLTEDCEKIIKLYSELRHPLMHYDYQYFENLFENKENSELTKNLNLDIFKSLPLVRKMKLNNKVNYLEDNDTLFVLQKTKKAKTLYQIYDALCEQKNGFNKFINDFFVSDGEENTVFKQIINEKFQSEMEFLEKRISESEKKNEKLKKKLDSMKAHFRNINSEDTKEAYFWDIHSSRNYKTKYNERKNLVNEYTKLLGSSKEKKLLREEITKINRQLLKLKQEMEEITKKNSLFRLEYKMKIAFGFLFCEFDGNISKFKDEFDASNQEKIIQYHKNGEKYLTSFLKEEEKEKFNLEKMQKIIQKTEEEDWLLPETKNNLFKFYLLTYLLLPYELKGDFLGFVKKHYYDIKNVDFMDENQNNIQVSQTVEKQEDYFYHKIRLFEKNTKKYEIVKYSIVPNEKLKQYFEDLGIDIKYLTGSVESGEKWLGENLGIDIKYLTVEQKSEVSEEKNKKVSLKNNGMFNKTILLFVFKYYQIAFKLFNDIELYSLFFLREKSEKPFEVFLEELKDKMIGKQLNFGQLLYVVYEVLVKNKDLDKILSKKIDYRKDKSFSPEIAYLRNFLSHLNYSKFLDNFMKINTNKSDENKEVLIPSIKIQKMIQFIEKCNLQNQIDFDFNFVNDFYMRKEKMFFIQLKQIFPDINSTEKQKKSEKEEILRKRYHLINKKNEQIKDEHEAQSQLYEKILSLQKIFSCDKNNFYRRLKEEKLLFLEKQGKKKISMKEIKDKIASDISDLLGILKKEITRDIKDKLTEKFRYCEEKLLNISFYNHQDKKKEEGIRVFLIRDKNSDNFKFESILDDGSNKIFISKNGKEITIQCCDKVLETLMIEKNTLKISSNGKIISLIPHYSYSIDVKY

SEQ ID NO: 158 - protein, 668 aa, Fusobacterium necorphorum
MTEKKSIIFKNKSSVEIVKKDIFSQTPDNMIRNYKITLKISEKNPRVVEAEIEDLMNSTILKDGRRSARREKSMTERKLIEEKVAENYSLLANCPMEEVDSIKIYKIKRFLTYRSNMLLYFASINSFLCEGIKGKDNETEEIWHLKDNDVRKEKVKENFKNKLIQSTENYNSSLKNQIEEKEKLLRKESKKGAFYRTIIKKLQQERIKELSEKSLTEDCEKIIKLYSELRHPLMHYDYQYFENLFENKENSELTKNLNLDIFKSLPLVRKMKLNNKVNYLEDNDTLFVLQKTKKAKTLYQIYDALCEQKNGFNKFINDFFVSDGEENTVFKQIINEKFQSEMEFLEKRISESEKKNEKLKKKFDSMKAHFHNINSEDTKEAYFWDIHSSSNYKTKYNERKNLVNEYTELLGSSKEKKLLREEITQINRKLLKLKQEMEEITKKNSLFRLEYKMKIAFGFLFCEFDGNISKFKDEFDASNQEKIIQYHKNGEKYLTYFLKEEEKEKFNLEKMQKIIQKTEEEDWLLPETKNNLFKFYLLTYLLLPYELKGDFLGFVKKHYYDIKNVDFMDENQNNIQVSQTVEKQEDYFYHKIRLFEKNTKKYEIVKYSIVPNEKLKQYFEDLGIDIKYLTGSVESGEKWLGENLGIDIKYLTVEQKSEVSEEKIKKFL

SEQ ID NO: 159 - protein, 1121 aa, Fusobacterium perfoetens
MGKPNRSSIIKIIISNYDNKGIKEVKVRYNKQAQLDTFLIKSELKDGKFILYSIVDKAREKYRYSFEIDKTNINKNEILIIKKDIYSNKEDKVIRKYILSFEVSEKNDRTIVTKIKDCLETQKKEKFERENTRRLISETERKLLSEETQKTYSKIACCSPEDIDSVKIYKIKRYLAYRSNMLLFFSLINDIFVKGVVKDNGEEVGEIWRIIDSKEIDEKKTYDLLVENFKKRMSQEFINYKQSIENKIEKNTNKIKEIEQKLKKEKYKKEINRLKKQLIELNRENDLLEKDKIELSDEEIREDIEKILKIYSDLRHKLMHYNYQYFENLFENKKISKEKNEDVNLTELLDLNLFRYLPLVRQLKLENKTNYLEKEDKITVLGVSDSAIKYYSYYNFLCEQKNGFNNFINSFFSNDGEENKSFKEKINLSLEKEIEIMEKETNEKIKEINKNELQLMKEQKELGTAYVLDIHSLNDYKISHNERNKNVKLQNDIMNGNRDKNALDKINKKLVELKIKMDKITKRNSILRLKYKLQVAYGFLMEEYKGNIKKFKDEFDISKEKIKSYKSKGEKYLEVKSEKKYITKILNSIEDIHNITWLKNQEENNLFKFYVLTYILLPFEFRGDFLGFVKKHYYDIKNVEFLDENNDRLTPEQLEKMKNDSFFNKIRLFEKNSKKYDILKESILTSERIGKYFSLLNTGAKYFEYGGEENRGIFNKNIIIPIFKYYQIVLKLYNDVELAMLLTLSESDEKDINKIKELVTLKEKVSPKKIDYEKKYKFSVLLDCFNRIINLGKKDFLASEEVKEVAKTFTNLAYLRNKICHLNYSKFIDDLLTIDTNKSTTDSEGKLLINDRIRKLIKFIRENNQKMNISIDYNYINDYYMKKEKFIFGQRKQAKTIIDSGKKANKRNKAEELLKMYRVKKENINLIYELSKKLNELTKSELFLLDKKLLKDIDFTDVKIKNKSFFELKNDVKEVANIKQALQKHSSELIGIYKKEVIMAIKRSIVSKLIYDEEKVLSIIIYDKTNKKYEDFLLEIRRERDINKFQFLIDEKKEKLGYEKIIETKEKKKVVVKIQNNSELVSEPRIIKNKDKKKAKTPEEISKLGILDLTNHYCFNLKITL

SEQ ID NO: 160 - protein, 897 aa, Fusobacterium ulcerans
MENKGNNKKIDFDENYNILVAQIKEYFTKEIENYNNRIDNIIDKKELLKYSEKKEESEKNKKLEELNKLKSQKLKILTDEEIKADVIKIIKIFSDLRHSLMHYEYKYFENLFENKKNEELAELLNLNLFKNLTLLRQMKIENKTNYLEGREEFNIIGKNIKAKEVLGHYNLLAEQKNGFNNFINSFFVQDGTENLEFKKLIDEHFVNAKKRLERNIKKSKKLEKELEKMEQHYQRLNCAYVWDIHTSTTYKKLYNKRKSLIEEYNKQINEIKDKEVITAINVELLRIKKEMEEITKSNSLFRLKYKMQIAYAFLEIEFGGNIAKFKDEFDCSKMEEVQKYLKKGVKYLKYYKDKEAQKNYEFPFEEIFENKDTHNEEWLENTSENNLFKFYILTYLLLPMEFKGDFLGVVKKHYYDIKNVDFTDESEKELSQVQLDKMIGDSFFHKIRLFEKNTKRYEIIKYSILTSDEIKRYFRLLELDVPYFEYEKGTDEIGIFNKNIILTIFKYYQIIFRLYNDLEIHGLFNISSDLDKILRDLKSYGNKNINFREFLYVIKQNNNSSTEEEYRKIWENLEAKYLRLHLLTPEKEEIKTKTKEELEKLNEISNLRNGICHLNYKEIIEEILKTEISEKNKEATLNEKIRKVINFIKENELDKVELGFNFINDFFMKKEQFMFGQIKQVKEGNSDSITTERERKEKNNKKLKETYELNCDNLSEFYETSNNLRERANSSSLLEDSAFLKKIGLYKVKNNKVNSKVKDEEKRIENIKRKLLKDSSDIMGMYKAEVVKKLKEKLILIFKHDEEKRIYVTVYDTSKAVPENISKEILVKRNNSKEEYFFEDNNKKYVTEYYTLEITETNELKVIPAKKLEGKEFKTEKNKENKLMLNNHYCFNVKIIY

SEQ ID NO: 161 - protein, 1111 aa, Anaerosalibacter sp.
MKSGRREKAKSNKSSIVRVIISNFDDKQVKEIKVLYTKQGGIDVIKFKSTEKDEKGRMKFNFDCAYNRLEEEEFNSFGGKGKQSFFVTTNEDLTELHVTKRHKTTGEIIKDYTIQGKYTPIKQDRTKVTVSITDNKDHFDSNDLGDKIRLSRSLTQYTNRILLDADVMKNYREIVCSDSEKVDETINIDSQEIYKINRFLSYRSNMIIYYQMINNFLLHYDGEEDKGGNDSINLINEIWKYENKKNDEKEKIIERSYKSIEKSINQYILNHNTEVESGDKEKKIDISEERIKEDLKKTFILFSRLRHYMVHYNYKFYENLYSGKNFIIYNKDKSKSRRFSELLDLNIFKELSKIKLVKNRAVSNYLDKKTTIHVLNKNINAIKLLDIYRDICETKNGFNNFINNMMTISGEEDKEYKEMVTKHFNENMNKLSIYLENFKKHSDFKTNNKKKETYNLLKQELDEQKKLRLWFNAPYVYDIHSSKKYKELYVERKKYVDIHSKLIEAGINNDNKKKLNEINVKLCELNTEMKEMTKLNSKYRLQYKLQLAFGFILEEFNLDIDKFVSAFDKDNNLTISKFMEKRETYLSKSLDRRDNRFKKLIKDYKFRDTEDIFCSDRENNLVKLYILMYILLPVEIRGDFLGFVKKNYYDLKHVDFIDKRNNDNKDTFFHDLRLFEKNVKRLEVTSYSLSDGFLGKKSREKFGKELEKFIYKNVSIALPTNIDIKEFNKSLVLPMMKNYQIIFKLLNDIEISALFLIAKKEGNEGSITFKKVIDKVRKEDMNGNINFSQVMKMALNEKVNCQIRNSIAHINMKQLYIEPLNIYINNNQNKKTISEQMEEIIDICITKGLTGKELNKNIINDYYMKKEKLVFNLKLRKRNNLVSIDAQQKNMKEKSILNKYDLNYKDENLNIKEIILKVNDLNNKQKLLKETTEGESNYKNALSKDILLLNGIIRKNINFKIKEMILGIIQQNEYRYVNINIYDKIRKEDHNIDLKINNKYIEISCYENKSNESTDERINFKIKYMDLKVKNELLVPSCYEDIYIKKKIDLEIRYIENCKVVYIDIYYKKYNINLEFDGKTLFVKFNKDVKKNNQKVNLESNYIQNIKFIVS

SEQ ID NO: 162 - DNA, 45 bp, Artificial Sequence
  Synthetic
catagaatgttctaaaccatcctgcggcctctactctgcattcaa

SEQ ID NO: 163 - DNA, 45 bp, Artificial Sequence
  Synthetic
catagaatgttcgaaaccatcctgcggcctctactctgcattcaa

SEQ ID NO: 164 - DNA, 45 bp, Artificial Sequence
  Synthetic
catagaatggtcgaaaccatcctgcggcctctactctgcattcaa

SEQ ID NO: 165 - DNA, 45 bp, Artificial Sequence
  Synthetic
catagaatgttcaaaaccatcctgcggcctctactctgcattcaa

SEQ ID NO: 166 - DNA, 45 bp, Artificial Sequence
  Synthetic
catagaatgatcaaaaccatcctgcggcctctactctgcattcaa

SEQ ID NO: 167 - DNA, 46 bp, Artificial Sequence
  Synthetic
ggtttctccatcaattaccacttgcttcctgtaggaatcctctatt

SEQ ID NO: 168 - DNA, 46 bp, Artificial Sequence
  Synthetic
ggtttctccatcaatgaccacttgcttcctgtaggaatcctctatt

SEQ ID NO: 169 - DNA, 46 bp, Artificial Sequence
  Synthetic
ggtttctccatcaaggaccacttgcttcctgtaggaatcctctatt

SEQ ID NO: 170 - DNA, 46 bp, Artificial Sequence
  Synthetic
ggtttctccatcaataaccacttgcttcctgtaggaatcctctatt

SEQ ID NO: 171 - DNA, 46 bp, Artificial Sequence
  Synthetic
ggtttctccatcaaaaaccacttgcttcctgtaggaatcctctatt

SEQ ID NO: 172 - DNA, 46 bp, Artificial Sequence
  Synthetic
gcctttctctcctgtagccaaggccacaaaattatccactgttttt

SEQ ID NO: 173 - DNA, 46 bp, Artificial Sequence
  Synthetic
gcctttctctcctggagccaaggccacaaaattatccactgttttt

SEQ ID NO: 174 - DNA, 46 bp, Artificial Sequence
  Synthetic
gcctttctctcctgaagccaaggccacaaaattatccactgttttt

SEQ ID NO: 175 - DNA, 46 bp, Artificial Sequence
  Synthetic
gcatagaatgttctaaaccatcctgcggcctctactctgcattcaa

SEQ ID NO: 176 - DNA, 46 bp, Artificial Sequence
  Synthetic
gcatagaatgttctaaacgatcctgcggcctctactctgcattcaa

SEQ ID NO: 177 - DNA, 46 bp, Artificial Sequence
  Synthetic
gcatagaatgttctaaactatcctgcggcctctactctgcattcaa

SEQ ID NO: 178 - DNA, 46 bp, Artificial Sequence
  Synthetic
gcatagaatgttctaaacaatcctgcggcctctactctgcattcaa

SEQ ID NO: 179 - DNA, 31 bp, Artificial Sequence
  Synthetic
gcatcctgcggcctctactctgcattcaatt

SEQ ID NO: 180 - DNA, 31 bp, Artificial Sequence
  Synthetic
gaccatcctgcggcctctactctgcattcaa

SEQ ID NO: 181 - DNA, 31 bp, Artificial Sequence
  Synthetic
gaaaccatcctgcggcctctactctgcattc

SEQ ID NO: 182 - DNA, 31 bp, Artificial Sequence
  Synthetic
gctaaaccatcctgcggcctctactctgcat

SEQ ID NO: 183 - DNA, 31 bp, Artificial Sequence
  Synthetic
gttctaaaccatcctgcggcctctactctgc

SEQ ID NO: 184 - DNA, 31 bp, Artificial Sequence
  Synthetic
gtgttctaaaccatcctgcggcctctactct

SEQ ID NO: 185 - DNA, 31 bp, Artificial Sequence
  Synthetic
gaatgttctaaaccatcctgcggcctctact

SEQ ID NO: 186 - DNA, 31 bp, Artificial Sequence
  Synthetic
gagaatgttctaaaccatcctgcggcctcta

SEQ ID NO: 187 - DNA, 31 bp, Artificial Sequence
  Synthetic
gatagaatgttctaaaccatcctgcggcctc

SEQ ID NO: 188 - DNA, 31 bp, Artificial Sequence
  Synthetic
gccatagaatgttctaaaccatcctgcggcc

SEQ ID NO: 189 - DNA, 31 bp, Artificial Sequence
  Synthetic
gttccatagaatgttctaaaccatcctgcgg

SEQ ID NO: 190 - DNA, 31 bp, Artificial Sequence
  Synthetic
gctttccatagaatgttctaaaccatcctgc

SEQ ID NO: 191 - DNA, 31 bp, Artificial Sequence
  Synthetic
gctctttccatagaatgttctaaaccatcct

SEQ ID NO: 192 - DNA, 31 bp, Artificial Sequence
  Synthetic
gatctctttccatagaatgttctaaaccatc

SEQ ID NO: 193 - DNA, 31 bp, Artificial Sequence
  Synthetic
ggaatctctttccatagaatgttctaaacca

SEQ ID NO: 194 - DNA, 51 bp, Artificial Sequence
  Synthetic
gcatcctgcggcctctactctgcattcaattacatactgacacattcggca

SEQ ID NO: 195 - DNA, 51 bp, Artificial Sequence
  Synthetic
gaccatcctgcggcctctactctgcattcaattacatactgacacattcgg

SEQ ID NO: 196 - DNA, 51 bp, Artificial Sequence
  Synthetic
gaaaccatcctgcggcctctactctgcattcaattacatactgacacattc

SEQ ID NO: 197 - DNA, 51 bp, Artificial Sequence
  Synthetic
gctaaaccatcctgcggcctctactctgcattcaattacatactgacacat

SEQ ID NO: 198 - DNA, 51 bp, Artificial Sequence
  Synthetic
gttctaaaccatcctgcggcctctactctgcattcaattacatactgacac

SEQ ID NO: 199 - DNA, 51 bp, Artificial Sequence
  Synthetic
gtgttctaaaccatcctgcggcctctactctgcattcaattacatactgac

SEQ ID NO: 200 - DNA, 51 bp, Artificial Sequence
  Synthetic
gaatgttctaaaccatcctgcggcctctactctgcattcaattacatactg

SEQ ID NO: 201 - DNA, 51 bp, Artificial Sequence
  Synthetic
gagaatgttctaaaccatcctgcggcctctactctgcattcaattacatac

SEQ ID NO: 202 - DNA, 51 bp, Artificial Sequence
  Synthetic
gatagaatgttctaaaccatcctgcggcctctactctgcattcaattacat

SEQ ID NO: 203 - DNA, 51 bp, Artificial Sequence
  Synthetic
gccatagaatgttctaaaccatcctgcggcctctactctgcattcaattac

SEQ ID NO: 204 - DNA, 51 bp, Artificial Sequence
  Synthetic
gttccatagaatgttctaaaccatcctgcggcctctactctgcattcaatt

SEQ ID NO: 205 - DNA, 51 bp, Artificial Sequence
  Synthetic
gctttccatagaatgttctaaaccatcctgcggcctctactctgcattcaa

SEQ ID NO: 206 - DNA, 51 bp, Artificial Sequence
  Synthetic
gctctttccatagaatgttctaaaccatcctgcggcctctactctgcattc

SEQ ID NO: 207 - DNA, 51 bp, Artificial Sequence
  Synthetic
gatctctttccatagaatgttctaaaccatcctgcggcctctactctgcat

SEQ ID NO: 208 - DNA, 51 bp, Artificial Sequence
  Synthetic
ggaatctctttccatagaatgttctaaaccatcctgcggcctctactctgc

SEQ ID NO: 209 - DNA, 51 bp, Artificial Sequence
  Synthetic
gtggaatctctttccatagaatgttctaaaccatcctgcggcctctactct

SEQ ID NO: 210 - DNA, 51 bp, Artificial Sequence
  Synthetic
gactggaatctctttccatagaatgttctaaaccatcctgcggcctctact

SEQ ID NO: 211 - DNA, 51 bp, Artificial Sequence
  Synthetic
ggaactggaatctctttccatagaatgttctaaaccatcctgcggcctcta

SEQ ID NO: 212 - DNA, 51 bp, Artificial Sequence
  Synthetic
gtggaactggaatctctttccatagaatgttctaaaccatcctgcggcctc

SEQ ID NO: 213 - DNA, 51 bp, Artificial Sequence
  Synthetic
gcctggaactggaatctctttccatagaatgttctaaaccatcctgcggcc

SEQ ID NO: 214 - DNA, 51 bp, Artificial Sequence
  Synthetic
gttcctggaactggaatctctttccatagaatgttctaaaccatcctgcgg

SEQ ID NO: 215 - DNA, 51 bp, Artificial Sequence
  Synthetic
gggttcctggaactggaatctctttccatagaatgttctaaaccatcctgc

SEQ ID NO: 216 - DNA, 51 bp, Artificial Sequence
  Synthetic
gcaggttcctggaactggaatctctttccatagaatgttctaaaccatcct

SEQ ID NO: 217 - DNA, 51 bp, Artificial Sequence
  Synthetic
gaccaggttcctggaactggaatctctttccatagaatgttctaaaccatc

SEQ ID NO: 218 - DNA, 51 bp, Artificial Sequence
  Synthetic
ggtaccaggttcctggaactggaatctctttccatagaatgttctaaacca

SEQ ID NO: 219 - DNA, 71 bp, Artificial Sequence
  Synthetic
gcatcctgcggcctctactctgcattcaattacatactgacacattcggcaacatgtttttcctggtttat

SEQ ID NO: 220 - DNA, 71 bp, Artificial Sequence
  Synthetic
gaccatcctgcggcctctactctgcattcaattacatactgacacattcggcaacatgtttttcctggttt

SEQ ID NO: 221 - DNA, 71 bp, Artificial Sequence
  Synthetic
gaaaccatcctgcggcctctactctgcattcaattacatactgacacattcggcaacatgtttttcctggt

SEQ ID NO: 222 - DNA, 71 bp, Artificial Sequence
  Synthetic
gctaaaccatcctgcggcctctactctgcattcaattacatactgacacattcggcaacatgtttttcctg

SEQ ID NO: 223 - DNA, 71 bp, Artificial Sequence
  Synthetic
gttctaaaccatcctgcggcctctactctgcattcaattacatactgacacattcggcaacatgtttttcc

SEQ ID NO: 224 - DNA, 71 bp, Artificial Sequence
  Synthetic
gtgttctaaaccatcctgcggcctctactctgcattcaattacatactgacacattcggcaacatgttttt

SEQ ID NO: 225 - DNA, 71 bp, Artificial Sequence
  Synthetic
gaatgttctaaaccatcctgcggcctctactctgcattcaattacatactgacacattcggcaacatgttt

SEQ ID NO: 226 - DNA, 71 bp, Artificial Sequence
  Synthetic
gagaatgttctaaaccatcctgcggcctctactctgcattcaattacatactgacacattcggcaacatgt

SEQ ID NO: 227 - DNA, 71 bp, Artificial Sequence
  Synthetic
gatagaatgttctaaaccatcctgcggcctctactctgcattcaattacatactgacacattcggcaacat

SEQ ID NO: 228 - DNA, 71 bp, Artificial Sequence
  Synthetic
gccatagaatgttctaaaccatcctgcggcctctactctgcattcaattacatactgacacattcggcaac

SEQ ID NO: 229 - DNA, 71 bp, Artificial Sequence
  Synthetic
gttccatagaatgttctaaaccatcctgcggcctctactctgcattcaattacatactgacacattcggca

SEQ ID NO: 230 - DNA, 71 bp, Artificial Sequence
  Synthetic
gctttccatagaatgttctaaaccatcctgcggcctctactctgcattcaattacatactgacacattcgg

SEQ ID NO: 231 - DNA, 71 bp, Artificial Sequence
  Synthetic
gctctttccatagaatgttctaaaccatcctgcggcctctactctgcattcaattacatactgacacattc

SEQ ID NO: 232 - DNA, 71 bp, Artificial Sequence
  Synthetic
gatctctttccatagaatgttctaaaccatcctgcggcctctactctgcattcaattacatactgacacat

SEQ ID NO: 233 - DNA, 71 bp, Artificial Sequence
  Synthetic
ggaatctctttccatagaatgttctaaaccatcctgcggcctctactctgcattcaattacatactgacac

SEQ ID NO: 234 - DNA, 71 bp, Artificial Sequence
  Synthetic
gtggaatctctttccatagaatgttctaaaccatcctgcggcctctactctgcattcaattacatactgac

SEQ ID NO: 235 - DNA, 71 bp, Artificial Sequence
  Synthetic
gactggaatctctttccatagaatgttctaaaccatcctgcggcctctactctgcattcaattacatactg

SEQ ID NO: 236 - DNA, 71 bp, Artificial Sequence
  Synthetic
ggaactggaatctctttccatagaatgttctaaaccatcctgcggcctctactctgcattcaattacatac

SEQ ID NO: 237 - DNA, 71 bp, Artificial Sequence
  Synthetic
gtggaactggaatctctttccatagaatgttctaaaccatcctgcggcctctactctgcattcaattacat

SEQ ID NO: 238 - DNA, 71 bp, Artificial Sequence
  Synthetic
gcctggaactggaatctctttccatagaatgttctaaaccatcctgcggcctctactctgcattcaattac

SEQ ID NO: 239 - DNA, 71 bp, Artificial Sequence
  Synthetic
gttcctggaactggaatctctttccatagaatgttctaaaccatcctgcggcctctactctgcattcaatt

SEQ ID NO: 240 - DNA, 71 bp, Artificial Sequence
  Synthetic
gggttcctggaactggaatctctttccatagaatgttctaaaccatcctgcggcctctactctgcattcaa

SEQ ID NO: 241 - DNA, 71 bp, Artificial Sequence
  Synthetic
gcaggttcctggaactggaatctctttccatagaatgttctaaaccatcctgcggcctctactctgcattc

SEQ ID NO: 242 - DNA, 71 bp, Artificial Sequence
  Synthetic
gaccaggttcctggaactggaatctctttccatagaatgttctaaaccatcctgcggcctctactctgcat

SEQ ID NO: 243 - DNA, 71 bp, Artificial Sequence
  Synthetic
ggtaccaggttcctggaactggaatctctttccatagaatgttctaaaccatcctgcggcctctactctgc

SEQ ID NO: 244 - DNA, 71 bp, Artificial Sequence
  Synthetic
gatgtaccaggttcctggaactggaatctctttccatagaatgttctaaaccatcctgcggcctctactct

SEQ ID NO: 245 - DNA, 71 bp, Artificial Sequence
  Synthetic
ggtatgtaccaggttcctggaactggaatctctttccatagaatgttctaaaccatcctgcggcctctact

SEQ ID NO: 246 - DNA, 71 bp, Artificial Sequence
  Synthetic
gacgtatgtaccaggttcctggaactggaatctctttccatagaatgttctaaaccatcctgcggcctcta

SEQ ID NO: 247 - DNA, 71 bp, Artificial Sequence
  Synthetic
gacacgtatgtaccaggttcctggaactggaatctctttccatagaatgttctaaaccatcctgcggcctc

SEQ ID NO: 248 - DNA, 71 bp, Artificial Sequence
  Synthetic
gcaacacgtatgtaccaggttcctggaactggaatctctttccatagaatgttctaaaccatcctgcggcc

SEQ ID NO: 249 - DNA, 71 bp, Artificial Sequence
  Synthetic
gcccaacacgtatgtaccaggttcctggaactggaatctctttccatagaatgttctaaaccatcctgcgg

SEQ ID NO: 250 - DNA, 71 bp, Artificial Sequence
  Synthetic
ggacccaacacgtatgtaccaggttcctggaactggaatctctttccatagaatgttctaaaccatcctgc

SEQ ID NO: 251 - DNA, 71 bp, Artificial Sequence
  Synthetic
gttgacccaacacgtatgtaccaggttcctggaactggaatctctttccatagaatgttctaaaccatcct

SEQ ID NO: 252 - DNA, 71 bp, Artificial Sequence
  Synthetic
gccttgacccaacacgtatgtaccaggttcctggaactggaatctctttccatagaatgttctaaaccatc

SEQ ID NO: 253 - DNA, 71 bp, Artificial Sequence
  Synthetic
gttccttgacccaacacgtatgtaccaggttcctggaactggaatctctttccatagaatgttctaaacca

SEQ ID NO: 254 - DNA, 85 bp, Artificial Sequence
  Synthetic
gcatcctgcggcctctactctgcattcaattacatactgacacattcggcaacatgtttttcctggtttattttcacacagtcca

SEQ ID NO: 255 - DNA, 85 bp, Artificial Sequence
  Synthetic
gaccatcctgcggcctctactctgcattcaattacatactgacacattcggcaacatgtttttcctggtttattttcacacagtc

SEQ ID NO: 256 - DNA, 85 bp, Artificial Sequence
  Synthetic
gaaaccatcctgcggcctctactctgcattcaattacatactgacacattcggcaacatgtttttcctggtttattttcacacag

SEQ ID NO: 257 - DNA, 85 bp, Artificial Sequence
  Synthetic
gctaaaccatcctgcggcctctactctgcattcaattacatactgacacattcggcaacatgtttttcctggtttattttcacac

SEQ ID NO: 258 - DNA, 85 bp, Artificial Sequence
  Synthetic
gttctaaaccatcctgcggcctctactctgcattcaattacatactgacacattcggcaacatgtttttcctggtttattttcac

SEQ ID NO: 259 - DNA, 85 bp, Artificial Sequence
  Synthetic
gtgttctaaaccatcctgcggcctctactctgcattcaattacatactgacacattcggcaacatgtttttcctggtttattttc

SEQ ID NO: 260 - DNA, 85 bp, Artificial Sequence
  Synthetic
gaatgttctaaaccatcctgcggcctctactctgcattcaattacatactgacacattcggcaacatgtttttcctggtttattt

SEQ ID NO: 261 - DNA, 85 bp, Artificial Sequence
  Synthetic
gagaatgttctaaaccatcctgcggcctctactctgcattcaattacatactgacacattcggcaacatgtttttcctggtttat

SEQ ID NO: 262 - DNA, 85 bp, Artificial Sequence
  Synthetic
gatagaatgttctaaaccatcctgcggcctctactctgcattcaattacatactgacacattcggcaacatgtttttcctggttt

SEQ ID NO: 263 - DNA, 85 bp, Artificial Sequence
  Synthetic
gccatagaatgttctaaaccatcctgcggcctctactctgcattcaattacatactgacacattcggcaacatgtttttcctggt

SEQ ID NO: 264 - DNA, 85 bp, Artificial Sequence
  Synthetic
gttccatagaatgttctaaaccatcctgcggcctctactctgcattcaattacatactgacacattcggcaacatgtttttcctg

SEQ ID NO: 265 - DNA, 85 bp, Artificial Sequence
  Synthetic
gctttccatagaatgttctaaaccatcctgcggcctctactctgcattcaattacatactgacacattcggcaacatgtttttcc

SEQ ID NO: 266 - DNA, 85 bp, Artificial Sequence
  Synthetic
gctctttccatagaatgttctaaaccatcctgcggcctctactctgcattcaattacatactgacacattcggcaacatgttttt

SEQ ID NO: 267 - DNA, 85 bp, Artificial Sequence
  Synthetic
gatctctttccatagaatgttctaaaccatcctgcggcctctactctgcattcaattacatactgacacattcggcaacatgttt

SEQ ID NO: 268 - DNA, 85 bp, Artificial Sequence
  Synthetic
ggaatctctttccatagaatgttctaaaccatcctgcggcctctactctgcattcaattacatactgacacattcggcaacatgt

SEQ ID NO: 269 - DNA, 85 bp, Artificial Sequence
  Synthetic
gtggaatctctttccatagaatgttctaaaccatcctgcggcctctactctgcattcaattacatactgacacattcggcaacat

SEQ ID NO: 270 - DNA, 85 bp, Artificial Sequence
  Synthetic
gactggaatctctttccatagaatgttctaaaccatcctgcggcctctactctgcattcaattacatactgacacattcggcaac

SEQ ID NO: 271 - DNA, 85 bp, Artificial Sequence
  Synthetic
ggaactggaatctctttccatagaatgttctaaaccatcctgcggcctctactctgcattcaattacatactgacacattcggca

SEQ ID NO: 272 - DNA, 85 bp, Artificial Sequence
  Synthetic
gtggaactggaatctctttccatagaatgttctaaaccatcctgcggcctctactctgcattcaattacatactgacacattcgg

SEQ ID NO: 273 - DNA, 85 bp, Artificial Sequence
  Synthetic
gcctggaactggaatctctttccatagaatgttctaaaccatcctgcggcctctactctgcattcaattacatactgacacattc

SEQ ID NO: 274 - DNA, 85 bp, Artificial Sequence
  Synthetic
gttcctggaactggaatctctttccatagaatgttctaaaccatcctgcggcctctactctgcattcaattacatactgacacat

SEQ ID NO: 275 - DNA, 85 bp, Artificial Sequence
  Synthetic
gggttcctggaactggaatctctttccatagaatgttctaaaccatcctgcggcctctactctgcattcaattacatactgacac

SEQ ID NO: 276 - DNA, 85 bp, Artificial Sequence
  Synthetic
gcaggttcctggaactggaatctctttccatagaatgttctaaaccatcctgcggcctctactctgcattcaattacatactgac

SEQ ID NO: 277 - DNA, 85 bp, Artificial Sequence
  Synthetic
gaccaggttcctggaactggaatctctttccatagaatgttctaaaccatcctgcggcctctactctgcattcaattacatactg

SEQ ID NO: 278 - DNA, 85 bp, Artificial Sequence
  Synthetic
ggtaccaggttcctggaactggaatctctttccatagaatgttctaaaccatcctgcggcctctactctgcattcaattacatac

SEQ ID NO: 279 - DNA, 85 bp, Artificial Sequence
  Synthetic
gatgtaccaggttcctggaactggaatctctttccatagaatgttctaaaccatcctgcggcctctactctgcattcaattacat

SEQ ID NO: 280 - DNA, 85 bp, Artificial Sequence
  Synthetic
ggtatgtaccaggttcctggaactggaatctctttccatagaatgttctaaaccatcctgcggcctctactctgcattcaattac

SEQ ID NO: 281 - DNA, 85 bp, Artificial Sequence
  Synthetic
gacgtatgtaccaggttcctggaactggaatctctttccatagaatgttctaaaccatcctgcggcctctactctgcattcaatt

SEQ ID NO: 282 - DNA, 85 bp, Artificial Sequence
  Synthetic
gacacgtatgtaccaggttcctggaactggaatctctttccatagaatgttctaaaccatcctgcggcctctactctgcattcaa

SEQ ID NO: 283 - DNA, 85 bp, Artificial Sequence
  Synthetic
gcaacacgtatgtaccaggttcctggaactggaatctctttccatagaatgttctaaaccatcctgcggcctctactctgcattc

SEQ ID NO: 284 - DNA, 85 bp, Artificial Sequence
  Synthetic
gcccaacacgtatgtaccaggttcctggaactggaatctctttccatagaatgttctaaaccatcctgcggcctctactctgcat

SEQ ID NO: 285 - DNA, 85 bp, Artificial Sequence
  Synthetic
ggacccaacacgtatgtaccaggttcctggaactggaatctctttccatagaatgttctaaaccatcctgcggcctctactctgc

SEQ ID NO: 286 - DNA, 85 bp, Artificial Sequence
  Synthetic
gttgacccaacacgtatgtaccaggttcctggaactggaatctctttccatagaatgttctaaaccatcctgcggcctctactct

SEQ ID NO: 287 - DNA, 85 bp, Artificial Sequence
  Synthetic
gccttgacccaacacgtatgtaccaggttcctggaactggaatctctttccatagaatgttctaaaccatcctgcggcctctact

SEQ ID NO: 288 - DNA, 85 bp, Artificial Sequence
  Synthetic
gttccttgacccaacacgtatgtaccaggttcctggaactggaatctctttccatagaatgttctaaaccatcctgcggcctcta

SEQ ID NO: 289 - DNA, 85 bp, Artificial Sequence
  Synthetic
gggttccttgacccaacacgtatgtaccaggttcctggaactggaatctctttccatagaatgttctaaaccatcctgcggcctc

SEQ ID NO: 290 - DNA, 85 bp, Artificial Sequence
  Synthetic
gttggttccttgacccaacacgtatgtaccaggttcctggaactggaatctctttccatagaatgttctaaaccatcctgcggcc

SEQ ID NO: 291 - DNA, 85 bp, Artificial Sequence
  Synthetic
gccttggttccttgacccaacacgtatgtaccaggttcctggaactggaatctctttccatagaatgttctaaaccatcctgcgg

SEQ ID NO: 292 - DNA, 85 bp, Artificial Sequence
  Synthetic
ggcccttggttccttgacccaacacgtatgtaccaggttcctggaactggaatctctttccatagaatgttctaaaccatcctgc

SEQ ID NO: 293 - DNA, 85 bp, Artificial Sequence
  Synthetic
gccgcccttggttccttgacccaacacgtatgtaccaggttcctggaactggaatctctttccatagaatgttctaaaccatcct

SEQ ID NO: 294 - DNA, 85 bp, Artificial Sequence
  Synthetic
gcgccgcccttggttccttgacccaacacgtatgtaccaggttcctggaactggaatctctttccatagaatgttctaaaccatc

SEQ ID NO: 295 - DNA, 85 bp, Artificial Sequence
  Synthetic
ggtcgccgcccttggttccttgacccaacacgtatgtaccaggttcctggaactggaatctctttccatagaatgttctaaacca

SEQ ID NO: 296 - protein, 7 aa, Artificial Sequence
  Synthetic
GSGGGGS

SEQ ID NO: 297 - protein, 5 aa, Artificial Sequence
  Synthetic
EAAAK

SEQ ID NO: 298 - protein, 18 aa, Artificial Sequence
  Synthetic
GGSGGSGGSGGSGGSGGS

SEQ ID NO: 299 - protein, 16 aa, Artificial Sequence
  Synthetic
SGSETPGTSESATPES

SEQ ID NO: 300 - RNA, 28 nt, Artificial Sequence
  Synthetic
gccagcuuuccgggcauuggcuuccauc

SEQ ID NO: 301 - RNA, 28 nt, Artificial Sequence
  Synthetic
gccagcuuuccgggcauuggcuuccauc

SEQ ID NO: 302 - RNA, 28 nt, Artificial Sequence
  Synthetic
acccaggaaucucaggaaugucgacgau

SEQ ID NO: 303 - RNA, 28 nt, Artificial Sequence
  Synthetic
aggguuuucccagucacgacguuguaaa

SEQ ID NO: 304 - RNA, 30 nt, Artificial Sequence
  Synthetic
gggcauuggcuuccaucucuuugagcaccu

SEQ ID NO: 305 - RNA, 30 nt, Artificial Sequence
  Synthetic
gugcagccagcuuuccgggcauuggcuucc

SEQ ID NO: 306 - RNA, 30 nt, Artificial Sequence
  Synthetic
gcagccagcuuuccgggcauuggcuuccau

SEQ ID NO: 307 - RNA, 30 nt, Artificial Sequence
  Synthetic
ggcuuccaucucuuugagcaccuccagcgg

SEQ ID NO: 308 - RNA, 30 nt, Artificial Sequence
  Synthetic
ggaaugucgacgaucgccucgccuaugccg

SEQ ID NO: 309 - RNA, 30 nt, Artificial Sequence
  Synthetic
gaaugucgacgaucgccucgccuaugccgc

SEQ ID NO: 310 - RNA, 30 nt, Artificial Sequence
  Synthetic
gaccugugcgaugaacugcuccaugggcuc

SEQ ID NO: 311 - RNA, 30 nt, Artificial Sequence
  Synthetic
guguggcagcguccugggaugaacuucuuc

SEQ ID NO: 312 - RNA, 30 nt, Artificial Sequence
  Synthetic
guggcagcguccugggaugaacuucuucau

SEQ ID NO: 313 - RNA, 30 nt, Artificial Sequence
  Synthetic
gcuucuugccgggcaacuucccgcggucag

SEQ ID NO: 314 - RNA, 31 nt, Artificial Sequence
  Synthetic
gcaggguuuucccagucacgacguuguaaaa

SEQ ID NO: 315 - RNA, 31 nt, Artificial Sequence; identical to SEQ ID NO: 314
  Synthetic

SEQ ID NO: 316 - RNA, 28 nt, Artificial Sequence
  Synthetic
acccaggaaucucaggaaugucgacgau

SEQ ID NO: 317 - RNA, 21 nt, Artificial Sequence
  Synthetic
cagcuuuccgggcauuggcuu

SEQ ID NO: 318 - RNA, 30 nt, Artificial Sequence
  Synthetic
ccgcuggaggugcucaaagagauggaagcc

SEQ ID NO: 319 - RNA, 28 nt, Artificial Sequence
  Synthetic
gccagcuuuccgggcauuggcuuccauc

SEQ ID NO: 320 - RNA, 28 nt, Artificial Sequence
  Synthetic
acccaggaaucucaggaaugucgacgau

SEQ ID NO: 321 - RNA, 30 nt, Artificial Sequence; identical to SEQ ID NO: 304
  Synthetic

SEQ ID NO: 322 - RNA, 30 nt, Artificial Sequence; identical to SEQ ID NO: 309
  Synthetic

SEQ ID NO: 323 - RNA, 28 nt, Artificial Sequence
  Synthetic
caaggcacucuugccuacgccaccagcu

SEQ ID NO: 324 - RNA, 28 nt, Artificial Sequence
  Synthetic
ucauauucguccacaaaaugauucugaa

SEQ ID NO: 325 - RNA, 28 nt, Artificial Sequence
  Synthetic
auuauuuauggcaaauacacaaagaaag

SEQ ID NO: 326 - RNA, 28 nt, Artificial Sequence
  Synthetic
gaauaucuucaaaugauuuaguauuauu

SEQ ID NO: 327 - RNA, 28 nt, Artificial Sequence
  Synthetic
accauagguacaucuucagaguccuuaa

SEQ ID NO: 328 - RNA, 30 nt, Artificial Sequence
  Synthetic
gucaaggcacucuugccuacgccaccagcu

SEQ ID NO: 329 - RNA, 30 nt, Artificial Sequence
  Synthetic
gaucauauucguccacaaaaugauucugaa

SEQ ID NO: 330 - RNA, 30 nt, Artificial Sequence
  Synthetic
guauuauuuauggcaaauacacaaagaaag

SEQ ID NO: 331 - RNA, 30 nt, Artificial Sequence
  Synthetic
gugaauaucuucaaaugauuuaguauuauu

SEQ ID NO: 332 - RNA, 30 nt, Artificial Sequence
  Synthetic
ggaccauagguacaucuucagaguccuuaa

SEQ ID NO: 333 - DNA, 50 bp, Artificial Sequence
  Synthetic
aagagtgccttgacgatacagcctcgaggctgtatcgtcaaggcactctt

SEQ ID NO: 334 - DNA, 48 bp, Artificial Sequence
  Synthetic
aatcattttgtggacgaatatctcgagatattcgtccacaaaatgatt

SEQ ID NO: 335 - DNA, 48 bp, Artificial Sequence
  Synthetic
aaataatactaaatcatttgactcgagtcaaatgatttagtattattt

SEQ ID NO: 336 - DNA, 48 bp, Artificial Sequence
  Synthetic
aataatactaaatcatttgaactcgagttcaaatgatttagtattatt

SEQ ID NO: 337 - DNA, 48 bp, Artificial Sequence
  Synthetic
aaggactctgaagatgtacctctcgagaggtacatcttcagagtcctt

SEQ ID NO: 338 - RNA, 30 nt, Artificial Sequence
  Synthetic
gagaucagggcaaacagaacuuugacuccc

SEQ ID NO: 339 - RNA, 30 nt, Artificial Sequence
  Synthetic
ggaugcagaucagggcaaacagaacuuuga

SEQ ID NO: 340 - RNA, 30 nt, Artificial Sequence
  Synthetic
gcacagcgaugcagaucagggcaaacagaa

SEQ ID NO: 341 - RNA, 30 nt, Artificial Sequence
  Synthetic
gcucggccacagcgaugcagaucagggcaa

SEQ ID NO: 342 - RNA, 30 nt, Artificial Sequence
  Synthetic
ggggcuuggccucggccacagcgaugcaga

SEQ ID NO: 343 - RNA, 30 nt, Artificial Sequence
  Synthetic
gugggcuuggccucggccacagcgaugcag

SEQ ID NO: 344 - RNA, 30 nt, Artificial Sequence
  Synthetic
gucucggugggcuuggccucggccacagcg

SEQ ID NO: 345 - RNA, 30 nt, Artificial Sequence
  Synthetic
guucguuguucucggugggcuuggccucgg

SEQ ID NO: 346 - RNA, 30 nt, Artificial Sequence
  Synthetic
ggaagucuucguuguucucggugggcuugg

SEQ ID NO: 347 - RNA, 30 nt, Artificial Sequence
  Synthetic
gauguugaagucuucguuguucucgguggg

SEQ ID NO: 348 - RNA, 30 nt, Artificial Sequence
  Synthetic
gcggccacgauguugaagucuucguuguuc

SEQ ID NO: 349 - RNA, 30 nt, Artificial Sequence
  Synthetic
guggccacggccacgauguugaagucuucg

SEQ ID NO: 350 - RNA, 30 nt, Artificial Sequence
  Synthetic
gguugcuggccacggccacgauguugaagu

SEQ ID NO: 351 - RNA, 30 nt, Artificial Sequence
  Synthetic
gucgcgaaguugcuggccacggccacgaug

SEQ ID NO: 352 - RNA, 30 nt, Artificial Sequence
  Synthetic
gccguggucgcgaaguugcuggccacggcc

SEQ ID NO: 353 - RNA, 30 nt, Artificial Sequence
  Synthetic
gcgagauccguggucgcgaaguugcuggcc

SEQ ID NO: 354 - RNA, 30 nt, Artificial Sequence
  Synthetic
gcagcaucgagauccguggucgcgaaguug

SEQ ID NO: 355 - RNA, 30 nt, Artificial Sequence
  Synthetic
gggucagcaucgagauccguggucgcgaag

SEQ ID NO: 356 - RNA, 30 nt, Artificial Sequence
  Synthetic
gcuucccgcggucagcaucgagauccgugg

SEQ ID NO: 357 - RNA, 30 nt, Artificial Sequence
  Synthetic
ggggcaacuucccgcggucagcaucgagau

SEQ ID NO: 358 - RNA, 30 nt, Artificial Sequence
  Synthetic
gucuugccgggcaacuucccgcggucagca

SEQ ID NO: 359 - RNA, 30 nt, Artificial Sequence
  Synthetic
ggcagcuucuugccgggcaacuucccgcgg

SEQ ID NO: 360 - RNA, 30 nt, Artificial Sequence
  Synthetic
gccagcggcagcuucuugccgggcaacuuc

SEQ ID NO: 361 - RNA, 30 nt, Artificial Sequence
  Synthetic
gcaccuccagcggcagcuucuugccgggca

SEQ ID NO: 362 - RNA, 30 nt, Artificial Sequence
  Synthetic
gcuuugagcaccuccagcggcagcuucuug

SEQ ID NO: 363 - RNA, 30 nt, Artificial Sequence
  Synthetic
gcaucucuuugagcaccuccagcggcagcu

SEQ ID NO: 364 - RNA, 30 nt, Artificial Sequence
  Synthetic
guccaucucuuugagcaccuccagcggcag

SEQ ID NO: 365 - RNA, 30 nt, Artificial Sequence; identical to SEQ ID NO: 304
  Synthetic

SEQ ID NO: 366 - RNA, 30 nt, Artificial Sequence
  Synthetic
guccgggcauuggcuuccaucucuuugagc

SEQ ID NO: 367 - RNA, 30 nt, Artificial Sequence
  Synthetic
ggccagcuuuccgggcauuggcuuccaucu

SEQ ID NO: 368 - RNA, 30 nt, Artificial Sequence
  Synthetic
gggugcagccagcuuuccgggcauuggcuu

SEQ ID NO: 369 - RNA, 30 nt, Artificial Sequence
  Synthetic
gagccccuggugcagccagcuuuccgggca

SEQ ID NO: 370 - RNA, 30 nt, Artificial Sequence
  Synthetic
gaucagacagccccuggugcagccagcuuu

SEQ ID NO: 371 - RNA, 30 nt, Artificial Sequence
  Synthetic
ggcagaucagacagccccuggugcagccag

SEQ ID NO: 372 - RNA, 30 nt, Artificial Sequence
  Synthetic
gacaggcagaucagacagccccuggugcag

SEQ ID NO: 373 - RNA, 30 nt, Artificial Sequence
  Synthetic
gugaugugggacaggcagaucagacagccc

SEQ ID NO: 374 - RNA, 30 nt, Artificial Sequence
  Synthetic
gacuugaugugggacaggcagaucagacag

SEQ ID NO: 375 - RNA, 30 nt, Artificial Sequence
  Synthetic
ggggcgugcacuugaugugggacaggcaga

SEQ ID NO: 376 - RNA, 30 nt, Artificial Sequence
  Synthetic
gcuucaucuugggcgugcacuugauguggg

SEQ ID NO: 377 - RNA, 30 nt, Artificial Sequence
  Synthetic
gugaacuucuucaucuugggcgugcacuug

SEQ ID NO: 378 - RNA, 30 nt, Artificial Sequence
  Synthetic
gggaugaacuucuucaucuugggcgugcac

SEQ ID NO: 379 - RNA, 30 nt, Artificial Sequence
  Synthetic
gugggaugaacuucuucaucuugggcgugc

SEQ ID NO: 380 - RNA, 30 nt, Artificial Sequence
  Synthetic
gggcagcguccugggaugaacuucuucauc

SEQ ID NO: 381 - RNA, 30 nt, Artificial Sequence
  Synthetic
ggguguggcagcguccugggaugaacuucu

SEQ ID NO: 382 - RNA, 30 nt, Artificial Sequence
  Synthetic
guucguagguguggcagcguccugggauga

SEQ ID NO: 383 - RNA, 30 nt, Artificial Sequence
  Synthetic
gcgccuucguagguguggcagcguccuggg

SEQ ID NO: 384 - RNA, 30 nt, Artificial Sequence
  Synthetic
gucuuugucgccuucguagguguggcagcg

SEQ ID NO: 385 - RNA, 30 nt, Artificial Sequence
  Synthetic
gcuuugucgccuucguagguguggcagcgu

SEQ ID NO: 386 - RNA, 30 nt, Artificial Sequence
  Synthetic
gugccgcccugugcggacucuuugucgccu

SEQ ID NO: 387 - RNA, 30 nt, Artificial Sequence
  Synthetic
guaugccgcccugugcggacucuuugucgc

SEQ ID NO: 388 - RNA, 30 nt, Artificial Sequence
  Synthetic
gccucgccuaugccgcccugugcggacucu

SEQ ID NO: 389 - RNA, 30 nt, Artificial Sequence
  Synthetic
ggaucgccucgccuaugccgcccugugcgg

SEQ ID NO: 390 - RNA, 30 nt, Artificial Sequence
  Synthetic
gaugucgacgaucgccucgccuaugccgcc

SEQ ID NO: 391 - RNA, 30 nt, Artificial Sequence
  Synthetic
gcaggaaugucgacgaucgccucgccuaug

SEQ ID NO: 392 - RNA, 30 nt, Artificial Sequence
  Synthetic
gaaucucaggaaugucgacgaucgccucgc

SEQ ID NO: 393 - RNA, 30 nt, Artificial Sequence
  Synthetic
gcccaggaaucucaggaaugucgacgaucg

SEQ ID NO: 394 - RNA, 30 nt, Artificial Sequence
  Synthetic
gccuugaacccaggaaucucaggaaugucg

SEQ ID NO: 395 - RNA, 30 nt, Artificial Sequence
  Synthetic
gccaaguccuugaacccaggaaucucagga

SEQ ID NO: 396 - RNA, 30 nt, Artificial Sequence
  Synthetic
gugggcuccaaguccuugaacccaggaauc

SEQ ID NO: 397 - RNA, 30 nt, Artificial Sequence
  Synthetic
gccaugggcuccaaguccuugaacccagga

SEQ ID NO: 398 - RNA, 30 nt, Artificial Sequence
  Synthetic
ggaacugcuccaugggcuccaaguccuuga

SEQ ID NO: 399 - RNA, 30 nt, Artificial Sequence
  Synthetic
gugcgaugaacugcuccaugggcuccaagu

SEQ ID NO: 400 - RNA, 30 nt, Artificial Sequence
  Synthetic
ggaccugugcgaugaacugcuccaugggcu

SEQ ID NO: 401 - RNA, 30 nt, Artificial Sequence
  Synthetic
gacagaucgaccugugcgaugaacugcucc

SEQ ID NO: 402 - RNA, 30 nt, Artificial Sequence
  Synthetic
gacacacagaucgaccugugcgaugaacug

SEQ ID NO: 403 - RNA, 30 nt, Artificial Sequence
  Synthetic
gugcaguccacacacagaucgaccugugcg

SEQ ID NO: 404 - RNA, 30 nt, Artificial Sequence
  Synthetic
gccaguugugcaguccacacacagaucgac

SEQ ID NO: 405 - RNA, 30 nt, Artificial Sequence
  Synthetic
gggcagccaguugugcaguccacacacaga

SEQ ID NO: 406 - RNA, 16 nt, Artificial Sequence
  Synthetic
guugugcaguccacac

SEQ ID NO: 407 - RNA, 30 nt, Artificial Sequence
  Synthetic
gaagcccuuugaggcagccaguugugcagu

SEQ ID NO: 408 - RNA, 30 nt, Artificial Sequence
  Synthetic
gcacguuggcaagcccuuugaggcagccag

SEQ ID NO: 409 - RNA, 30 nt, Artificial Sequence
  Synthetic
gacugcacguuggcaagcccuuugaggcag

SEQ ID NO: 410 - RNA, 30 nt, Artificial Sequence
  Synthetic
gggucagaacacugcacguuggcaagcccu

SEQ ID NO: 411 - RNA, 30 nt, Artificial Sequence
  Synthetic
gcaggucagaacacugcacguuggcaagcc

SEQ ID NO: 412 - RNA, 30 nt, Artificial Sequence
  Synthetic
gagcaggucagaacacugcacguuggcaag

SEQ ID NO: 413 - RNA, 30 nt, Artificial Sequence
  Synthetic
ggccacuucuugagcaggucagaacacugc

SEQ ID NO: 414 - RNA, 30 nt, Artificial Sequence
  Synthetic
gcggcagccacuucuugagcaggucagaac

SEQ ID NO: 415 - RNA, 30 nt, Artificial Sequence
  Synthetic
gugcggcagccacuucuugagcaggucaga

SEQ ID NO: 416 - RNA, 30 nt, Artificial Sequence
  Synthetic
gagcguugcggcagccacuucuugagcagg

SEQ ID NO: 417 - RNA, 30 nt, Artificial Sequence
  Synthetic
gaaaggucgcacagcguugcggcagccacu

SEQ ID NO: 418 - RNA, 30 nt, Artificial Sequence
  Synthetic
gcuggcaaaggucgcacagcguugcggcag

SEQ ID NO: 419 - RNA, 30 nt, Artificial Sequence
  Synthetic
gggcaaaggucgcacagcguugcggcagcc

SEQ ID NO: 420 - RNA, 30 nt, Artificial Sequence
  Synthetic
guggaucuugcuggcaaaggucgcacagcg

SEQ ID NO: 421 - RNA, 30 nt, Artificial Sequence
  Synthetic
gcaccuggcccuggaucuugcuggcaaagg

SEQ ID NO: 422 - RNA, 30 nt, Artificial Sequence
  Synthetic
guggcccuggaucuugcuggcaaaggucgc

SEQ ID NO: 423 - RNA, 30 nt, Artificial Sequence
  Synthetic
gugaucuuguccaccuggcccuggaucuug

SEQ ID NO: 424 - RNA, 30 nt, Artificial Sequence
  Synthetic
gccccuugaucuuguccaccuggcccugga

SEQ ID NO: 425 - RNA, 30 nt, Artificial Sequence
  Synthetic
gcccuugaucuuguccaccuggcccuggau

SEQ ID NO: 426 - RNA, 30 nt, Artificial Sequence
  Synthetic
gccuugaucuuguccaccuggcccuggauc

SEQ ID NO: 427 - RNA, 30 nt, Artificial Sequence
  Synthetic
ggcaaaggucgcacagcguugcggcagcca

SEQ ID NO: 428 - RNA, 30 nt, Artificial Sequence
  Synthetic
gcaaaggucgcacagcguugcggcagccac

SEQ ID NO: 429 - RNA, 30 nt, Artificial Sequence
  Synthetic
gaaggucgcacagcguugcggcagccacuu

SEQ ID NO: 430 - RNA, 30 nt, Artificial Sequence
  Synthetic
gaggucgcacagcguugcggcagccacuuc

SEQ ID NO: 431 - RNA, 31 nt, Artificial Sequence
  Synthetic
gguaaugccuggcuugucgacgcauagucug

SEQ ID NO: 432 - RNA, 31 nt, Artificial Sequence
  Synthetic
gggaaccuuggccguuauaaagucugaccag

SEQ ID NO: 433 - RNA, 31 nt, Artificial Sequence
  Synthetic
ggagggugagaauuuagaaccaagauuguug

SEQ ID NO: 434 - RNA, 30 nt, Artificial Sequence
  Synthetic
gaguccuggcaaugaacaguggcgcaguag

SEQ ID NO: 435 - RNA, 30 nt, Artificial Sequence
  Synthetic
gggugccacagcugcuaucaauacauucuc

SEQ ID NO: 436 - RNA, 30 nt, Artificial Sequence
  Synthetic
guuacauacugacacauucggcaacauguu

SEQ ID NO: 437 - RNA, 30 nt, Artificial Sequence
  Synthetic
guauguaccagguuccuggaacuggaaucu

SEQ ID NO: 438 - RNA, 30 nt, Artificial Sequence
  Synthetic
gccuugguuccauccagguucuccagggug

SEQ ID NO: 439 - RNA, 30 nt, Artificial Sequence
  Synthetic
gcagugaugggauucucaguagcuugagcg

SEQ ID NO: 440 - RNA, 30 nt, Artificial Sequence
  Synthetic
gagccuggcaucucaacaacagcgauggug

SEQ ID NO: 441 - RNA, 30 nt, Artificial Sequence
  Synthetic
gugucuggggcgauucuuacagaucuuccu

SEQ ID NO: 442 - RNA, 30 nt, Artificial Sequence
  Synthetic
gcuggaucugaagugaagucuguaucuucc

SEQ ID NO: 443 - RNA, 30 nt, Artificial Sequence
  Synthetic
ggcaacgucaucaggauuuccauagagugg

SEQ ID NO: 444 - RNA, 30 nt, Artificial Sequence
  Synthetic
gaggcgcaggagaugguguaguaguagaag

SEQ ID NO: 445 - RNA, 30 nt, Artificial Sequence
  Synthetic
gagggacccuggaauugguaucuugcuuug

SEQ ID NO: 446 - RNA, 30 nt, Artificial Sequence
  Synthetic
gguaagagucaacauuccugugugaaaccu

SEQ ID NO: 447 - RNA, 30 nt, Artificial Sequence
  Synthetic
gaccagaaucuguuuuccaucaacaaugag

SEQ ID NO: 448 - RNA, 30 nt, Artificial Sequence
  Synthetic
gauggcuguagucaguaugucaccaucuug

SEQ ID NO: 449 - RNA, 30 nt, Artificial Sequence
  Synthetic
guaccaucgaauggaucucuaauauguacg

SEQ ID NO: 450 - RNA, 30 nt, Artificial Sequence
  Synthetic
gagaucacaggcuccuucagcaucaaaaga

SEQ ID NO: 451 - RNA, 30 nt, Artificial Sequence
  Synthetic
gcuuugaccggcgaagagacuauugcagag

SEQ ID NO: 452 - RNA, 30 nt, Artificial Sequence
  Synthetic
gccccucaggcaauacucguacaugcaucg

SEQ ID NO: 453 - RNA, 30 nt, Artificial Sequence
  Synthetic
gcugguacuucuagggugucuccaugcuuu

SEQ ID NO: 454 - RNA, 31 nt, Artificial Sequence; identical to SEQ ID NO: 431
  Synthetic

SEQ ID NO: 455 - RNA, 31 nt, Artificial Sequence; identical to SEQ ID NO: 432
  Synthetic

SEQ ID NO: 456 - RNA, 31 nt, Artificial Sequence; identical to SEQ ID NO: 433
  Synthetic

SEQ ID NO: 457 - RNA, 31 nt, Artificial Sequence
  Synthetic
gcauccugcggccucuacucugcauucaauu

SEQ ID NO: 458 - RNA, 31 nt, Artificial Sequence
  Synthetic
gaccauccugcggccucuacucugcauucaa

SEQ ID NO: 459 - RNA, 31 nt, Artificial Sequence
  Synthetic
gaaaccauccugcggccucuacucugcauuc

SEQ ID NO: 460 - RNA, 31 nt, Artificial Sequence
  Synthetic
gcuaaaccauccugcggccucuacucugcau

SEQ ID NO: 461 - RNA, 31 nt, Artificial Sequence
  Synthetic
guucuaaaccauccugcggccucuacucugc

SEQ ID NO: 462 - RNA, 31 nt, Artificial Sequence
  Synthetic
guguucuaaaccauccugcggccucuacucu

SEQ ID NO: 463 - RNA, 31 nt, Artificial Sequence
  Synthetic
gaauguucuaaaccauccugcggccucuacu

SEQ ID NO: 464 - RNA, 31 nt, Artificial Sequence
  Synthetic
gagaauguucuaaaccauccugcggccucua

SEQ ID NO: 465 - RNA, 31 nt, Artificial Sequence
  Synthetic
gauagaauguucuaaaccauccugcggccuc

SEQ ID NO: 466 - RNA, 31 nt, Artificial Sequence
  Synthetic
gccauagaauguucuaaaccauccugcggcc

SEQ ID NO: 467 - RNA, 31 nt, Artificial Sequence
  Synthetic
guuccauagaauguucuaaaccauccugcgg

SEQ ID NO: 468 - RNA, 31 nt, Artificial Sequence
  Synthetic
gcuuuccauagaauguucuaaaccauccugc

SEQ ID NO: 469 - RNA, 31 nt, Artificial Sequence
  Synthetic
gcucuuuccauagaauguucuaaaccauccu

SEQ ID NO: 470 - RNA, 31 nt, Artificial Sequence
  Synthetic
gaucucuuuccauagaauguucuaaaccauc

SEQ ID NO: 471 - RNA, 31 nt, Artificial Sequence
  Synthetic
ggaaucucuuuccauagaauguucuaaacca

SEQ ID NO: 472 - RNA, 51 nt, Artificial Sequence
  Synthetic
gcauccugcggccucuacucugcauucaauuacauacugacacauucggca

SEQ ID NO: 473 - RNA, 51 nt, Artificial Sequence
  Synthetic
gaccauccugcggccucuacucugcauucaauuacauacugacacauucgg

SEQ ID NO: 474 - RNA, 51 nt, Artificial Sequence
  Synthetic
gaaaccauccugcggccucuacucugcauucaauuacauacugacacauuc

SEQ ID NO: 475 - RNA, 51 nt, Artificial Sequence
  Synthetic
gcuaaaccauccugcggccucuacucugcauucaauuacauacugacacau

SEQ ID NO: 476 - RNA, 51 nt, Artificial Sequence
  Synthetic
guucuaaaccauccugcggccucuacucugcauucaauuacauacugacac

SEQ ID NO: 477 - RNA, 51 nt, Artificial Sequence
  Synthetic
guguucuaaaccauccugcggccucuacucugcauucaauuacauacugac

SEQ ID NO: 478 - RNA, 51 nt, Artificial Sequence
  Synthetic
gaauguucuaaaccauccugcggccucuacucugcauucaauuacauacug

SEQ ID NO: 479 - RNA, 51 nt, Artificial Sequence
  Synthetic
gagaauguucuaaaccauccugcggccucuacucugcauucaauuacauac

SEQ ID NO: 480 - RNA, 51 nt, Artificial Sequence
  Synthetic
gauagaauguucuaaaccauccugcggccucuacucugcauucaauuacau

SEQ ID NO: 481 - RNA, 51 nt, Artificial Sequence
  Synthetic
gccauagaauguucuaaaccauccugcggccucuacucugcauucaauuac

SEQ ID NO: 482 - RNA, 51 nt, Artificial Sequence
  Synthetic
guuccauagaauguucuaaaccauccugcggccucuacucugcauucaauu

SEQ ID NO: 483 - RNA, 51 nt, Artificial Sequence
  Synthetic
gcuuuccauagaauguucuaaaccauccugcggccucuacucugcauucaa

SEQ ID NO: 484 - RNA, 51 nt, Artificial Sequence
  Synthetic
gcucuuuccauagaauguucuaaaccauccugcggccucuacucugcauuc

SEQ ID NO: 485 - RNA, 51 nt, Artificial Sequence
  Synthetic
gaucucuuuccauagaauguucuaaaccauccugcggccucuacucugcau

SEQ ID NO: 486 - RNA, 51 nt, Artificial Sequence
  Synthetic
ggaaucucuuuccauagaauguucuaaaccauccugcggccucuacucugc

SEQ ID NO: 487 - RNA, 51 nt, Artificial Sequence
  Synthetic
guggaaucucuuuccauagaauguucuaaaccauccugcggccucuacucu

SEQ ID NO: 488 - RNA, 51 nt, Artificial Sequence
  Synthetic
gacuggaaucucuuuccauagaauguucuaaaccauccugcggccucuacu

SEQ ID NO: 489 - RNA, 51 nt, Artificial Sequence
  Synthetic
ggaacuggaaucucuuuccauagaauguucuaaaccauccugcggccucua

SEQ ID NO: 490 - RNA, 51 nt, Artificial Sequence
  Synthetic
guggaacuggaaucucuuuccauagaauguucuaaaccauccugcggccuc

SEQ ID NO: 491 - RNA, 51 nt, Artificial Sequence
  Synthetic
gccuggaacuggaaucucuuuccauagaauguucuaaaccauccugcggcc

SEQ ID NO: 492 - RNA, 51 nt, Artificial Sequence
  Synthetic
guuccuggaacuggaaucucuuuccauagaauguucuaaaccauccugcgg

SEQ ID NO: 493 - RNA, 51 nt, Artificial Sequence
  Synthetic
ggguuccuggaacuggaaucucuuuccauagaauguucuaaaccauccugc

SEQ ID NO: 494 - RNA, 51 nt, Artificial Sequence
  Synthetic
gcagguuccuggaacuggaaucucuuuccauagaauguucuaaaccauccu

SEQ ID NO: 495 - RNA, 51 nt, Artificial Sequence
  Synthetic
gaccagguuccuggaacuggaaucucuuuccauagaauguucuaaaccauc

SEQ ID NO: 496 - RNA, 51 nt, Artificial Sequence
  Synthetic
gguaccagguuccuggaacuggaaucucuuuccauagaauguucuaaacca

SEQ ID NO: 497 - RNA, 71 nt, Artificial Sequence
  Synthetic
gcauccugcggccucuacucugcauucaauuacauacugacacauucggcaacauguuuuuccugguuuau

SEQ ID NO: 498 - RNA, 71 nt, Artificial Sequence
  Synthetic
gaccauccugcggccucuacucugcauucaauuacauacugacacauucggcaacauguuuuuccugguuu

SEQ ID NO: 499 - RNA, 71 nt, Artificial Sequence
  Synthetic
gaaaccauccugcggccucuacucugcauucaauuacauacugacacauucggcaacauguuuuuccuggu

SEQ ID NO: 500 - RNA, 71 nt, Artificial Sequence
  Synthetic
gcuaaaccauccugcggccucuacucugcauucaauuacauacugacacauucggcaacauguuuuuccug

SEQ ID NO: 501 - RNA, 71 nt, Artificial Sequence
  Synthetic
guucuaaaccauccugcggccucuacucugcauucaauuacauacugacacauucggcaacauguuuuucc

SEQ ID NO: 502 - RNA, 71 nt, Artificial Sequence
  Synthetic
guguucuaaaccauccugcggccucuacucugcauucaauuacauacugacacauucggcaacauguuuuu

SEQ ID NO: 503 - RNA, 71 nt, Artificial Sequence
  Synthetic
gaauguucuaaaccauccugcggccucuacucugcauucaauuacauacugacacauucggcaacauguuu

SEQ ID NO: 504 - RNA, 71 nt, Artificial Sequence
  Synthetic
gagaauguucuaaaccauccugcggccucuacucugcauucaauuacauacugacacauucggcaacaugu

SEQ ID NO: 505 - RNA, 71 nt, Artificial Sequence
  Synthetic
gauagaauguucuaaaccauccugcggccucuacucugcauucaauuacauacugacacauucggcaacau

SEQ ID NO: 506 - RNA, 71 nt, Artificial Sequence
  Synthetic
gccauagaauguucuaaaccauccugcggccucuacucugcauucaauuacauacugacacauucggcaac

SEQ ID NO: 507 - RNA, 71 nt, Artificial Sequence
  Synthetic
guuccauagaauguucuaaaccauccugcggccucuacucugcauucaauuacauacugacacauucggca

SEQ ID NO: 508 - RNA, 71 nt, Artificial Sequence
  Synthetic
gcuuuccauagaauguucuaaaccauccugcggccucuacucugcauucaauuacauacugacacauucgg

SEQ ID NO: 509 - RNA, 71 nt, Artificial Sequence
  Synthetic
gcucuuuccauagaauguucuaaaccauccugcggccucuacucugcauucaauuacauacugacacauuc

SEQ ID NO: 510 - RNA, 71 nt, Artificial Sequence
  Synthetic
gaucucuuuccauagaauguucuaaaccauccugcggccucuacucugcauucaauuacauacugacacau

SEQ ID NO: 511 - RNA, 71 nt, Artificial Sequence
  Synthetic
ggaaucucuuuccauagaauguucuaaaccauccugcggccucuacucugcauucaauuacauacugacac

SEQ ID NO: 512 - RNA, 71 nt, Artificial Sequence
  Synthetic
guggaaucucuuuccauagaauguucuaaaccauccugcggccucuacucugcauucaauuacauacugac

SEQ ID NO: 513 - RNA, 71 nt, Artificial Sequence
  Synthetic
gacuggaaucucuuuccauagaauguucuaaaccauccugcggccucuacucugcauucaauuacauacug

SEQ ID NO: 514 - RNA, 71 nt, Artificial Sequence
  Synthetic
ggaacuggaaucucuuuccauagaauguucuaaaccauccugcggccucuacucugcauucaauuacauac

SEQ ID NO: 515 - RNA, 71 nt, Artificial Sequence
  Synthetic
guggaacuggaaucucuuuccauagaauguucuaaaccauccugcggccucuacucugcauucaauuacau

SEQ ID NO: 516 - RNA, 71 nt, Artificial Sequence
  Synthetic
gccuggaacuggaaucucuuuccauagaauguucuaaaccauccugcggccucuacucugcauucaauuac

SEQ ID NO: 517 - RNA, 71 nt, Artificial Sequence
  Synthetic
guuccuggaacuggaaucucuuuccauagaauguucuaaaccauccugcggccucuacucugcauucaauu

SEQ ID NO: 518 - RNA, 71 nt, Artificial Sequence
  Synthetic
ggguuccuggaacuggaaucucuuuccauagaauguucuaaaccauccugcggccucuacucugcauucaa

SEQ ID NO: 519 - RNA, 71 nt, Artificial Sequence
  Synthetic
gcagguuccuggaacuggaaucucuuuccauagaauguucuaaaccauccugcggccucuacucugcauuc

SEQ ID NO: 520 - RNA, 71 nt, Artificial Sequence
  Synthetic
gaccagguuccuggaacuggaaucucuuuccauagaauguucuaaaccauccugcggccucuacucugcau

SEQ ID NO: 521 - RNA, 71 nt, Artificial Sequence
  Synthetic
gguaccagguuccuggaacuggaaucucuuuccauagaauguucuaaaccauccugcggccucuacucugc

SEQ ID NO: 522 - RNA, 71 nt, Artificial Sequence
  Synthetic
gauguaccagguuccuggaacuggaaucucuuuccauagaauguucuaaaccauccugcggccucuacucu

SEQ ID NO: 523 - RNA, 71 nt, Artificial Sequence
  Synthetic
gguauguaccagguuccuggaacuggaaucucuuuccauagaauguucuaaaccauccugcggccucuacu

SEQ ID NO: 524 - RNA, 71 nt, Artificial Sequence
  Synthetic
gacguauguaccagguuccuggaacuggaaucucuuuccauagaauguucuaaaccauccugcggccucua

SEQ ID NO: 525 - RNA, 71 nt, Artificial Sequence
  Synthetic
gacacguauguaccagguuccuggaacuggaaucucuuuccauagaauguucuaaaccauccugcggccuc

SEQ ID NO: 526 - RNA, 71 nt, Artificial Sequence
  Synthetic
gcaacacguauguaccagguuccuggaacuggaaucucuuuccauagaauguucuaaaccauccugcggcc

SEQ ID NO: 527 - RNA, 71 nt, Artificial Sequence
  Synthetic
gcccaacacguauguaccagguuccuggaacuggaaucucuuuccauagaauguucuaaaccauccugcgg

SEQ ID NO: 528 - RNA, 71 nt, Artificial Sequence
  Synthetic
ggacccaacacguauguaccagguuccuggaacuggaaucucuuuccauagaauguucuaaaccauccugc

SEQ ID NO: 529 - RNA, 71 nt, Artificial Sequence
  Synthetic
guugacccaacacguauguaccagguuccuggaacuggaaucucuuuccauagaauguucuaaaccauccu

SEQ ID NO: 530 - RNA, 71 nt, Artificial Sequence
  Synthetic
gccuugacccaacacguauguaccagguuccuggaacuggaaucucuuuccauagaauguucuaaaccauc

SEQ ID NO: 531 - RNA, 71 nt, Artificial Sequence
  Synthetic
guuccuugacccaacacguauguaccagguuccuggaacuggaaucucuuuccauagaauguucuaaacca

SEQ ID NO: 532 - RNA, 85 nt, Artificial Sequence
  Synthetic
gcauccugcggccucuacucugcauucaauuacauacugacacauucggcaacauguuuuuccugguuuauuuucacacagucca

SEQ ID NO: 533 - RNA, 85 nt, Artificial Sequence
  Synthetic
gaccauccugcggccucuacucugcauucaauuacauacugacacauucggcaacauguuuuuccugguuuauuuucacacaguc

SEQ ID NO: 534 - RNA, 85 nt, Artificial Sequence
  Synthetic
gaaaccauccugcggccucuacucugcauucaauuacauacugacacauucggcaacauguuuuuccugguuuauuuucacacag

SEQ ID NO: 535 - RNA, 85 nt, Artificial Sequence
  Synthetic
gcuaaaccauccugcggccucuacucugcauucaauuacauacugacacauucggcaacauguuuuuccugguuuauuuucacac

SEQ ID NO: 536 - RNA, 85 nt, Artificial Sequence
  Synthetic
guucuaaaccauccugcggccucuacucugcauucaauuacauacugacacauucggcaacauguuuuuccugguuuauuuucac

SEQ ID NO: 537 - RNA, 85 nt, Artificial Sequence
  Synthetic
guguucuaaaccauccugcggccucuacucugcauucaauuacauacugacacauucggcaacauguuuuuccugguuuauuuuc

SEQ ID NO: 538 - RNA, 85 nt, Artificial Sequence
  Synthetic
gaauguucuaaaccauccugcggccucuacucugcauucaauuacauacugacacauucggcaacauguuuuuccugguuuauuu

SEQ ID NO: 539 - RNA, 85 nt, Artificial Sequence
  Synthetic
gagaauguucuaaaccauccugcggccucuacucugcauucaauuacauacugacacauucggcaacauguuuuuccugguuuau

SEQ ID NO: 540 - RNA, 85 nt, Artificial Sequence
  Synthetic
gauagaauguucuaaaccauccugcggccucuacucugcauucaauuacauacugacacauucggcaacauguuuuuccugguuu

SEQ ID NO: 541 - RNA, 85 nt, Artificial Sequence
  Synthetic
gccauagaauguucuaaaccauccugcggccucuacucugcauucaauuacauacugacacauucggcaacauguuuuuccuggu

SEQ ID NO: 542 - RNA, 85 nt, Artificial Sequence
  Synthetic
guuccauagaauguucuaaaccauccugcggccucuacucugcauucaauuacauacugacacauucggcaacauguuuuuccug

SEQ ID NO: 543 - RNA, 85 nt, Artificial Sequence
  Synthetic
gcuuuccauagaauguucuaaaccauccugcggccucuacucugcauucaauuacauacugacacauucggcaacauguuuuucc

SEQ ID NO: 544 - RNA, 85 nt, Artificial Sequence
  Synthetic
gcucuuuccauagaauguucuaaaccauccugcggccucuacucugcauucaauuacauacugacacauucggcaacauguuuuu

SEQ ID NO: 545 - RNA, 85 nt, Artificial Sequence
  Synthetic
gaucucuuuccauagaauguucuaaaccauccugcggccucuacucugcauucaauuacauacugacacauucggcaacauguuu

SEQ ID NO: 546 - RNA, 85 nt, Artificial Sequence
  Synthetic
ggaaucucuuuccauagaauguucuaaaccauccugcggccucuacucugcauucaauuacauacugacacauucggcaacaugu

SEQ ID NO: 547 - RNA, 85 nt, Artificial Sequence
  Synthetic
guggaaucucuuuccauagaauguucuaaaccauccugcggccucuacucugcauucaauuacauacugacacauucggcaacau

SEQ ID NO: 548 - RNA, 85 nt, Artificial Sequence
  Synthetic
gacuggaaucucuuuccauagaauguucuaaaccauccugcggccucuacucugcauucaauuacauacugacacauucggcaac

SEQ ID NO: 549 - RNA, 85 nt, Artificial Sequence
  Synthetic
ggaacuggaaucucuuuccauagaauguucuaaaccauccugcggccucuacucugcauucaauuacauacugacacauucggca

SEQ ID NO: 550 - RNA, 85 nt, Artificial Sequence
  Synthetic
guggaacuggaaucucuuuccauagaauguucuaaaccauccugcggccucuacucugcauucaauuacauacugacacauucgg

SEQ ID NO: 551 - RNA, 85 nt, Artificial Sequence
  Synthetic
gccuggaacuggaaucucuuuccauagaauguucuaaaccauccugcggccucuacucugcauucaauuacauacugacacauuc

SEQ ID NO: 552 - RNA, 85 nt, Artificial Sequence
  Synthetic
guuccuggaacuggaaucucuuuccauagaauguucuaaaccauccugcggccucuacucugcauucaauuacauacugacacau

SEQ ID NO: 553 - RNA, 85 nt, Artificial Sequence
  Synthetic
ggguuccuggaacuggaaucucuuuccauagaauguucuaaaccauccugcggccucuacucugcauucaauuacauacugacac

SEQ ID NO: 554 - RNA, 85 nt, Artificial Sequence
  Synthetic
gcagguuccuggaacuggaaucucuuuccauagaauguucuaaaccauccugcggccucuacucugcauucaauuacauacugac

SEQ ID NO: 555 - RNA, 85 nt, Artificial Sequence
  Synthetic
gaccagguuccuggaacuggaaucucuuuccauagaauguucuaaaccauccugcggccucuacucugcauucaauuacauacug

SEQ ID NO: 556 - RNA, 85 nt, Artificial Sequence
  Synthetic
gguaccagguuccuggaacuggaaucucuuuccauagaauguucuaaaccauccugcggccucuacucugcauucaauuacauac

SEQ ID NO: 557 - RNA, 85 nt, Artificial Sequence
  Synthetic
gauguaccagguuccuggaacuggaaucucuuuccauagaauguucuaaaccauccugcggccucuacucugcauucaauuacau

SEQ ID NO: 558 - RNA, 85 nt, Artificial Sequence
  Synthetic
gguauguaccagguuccuggaacuggaaucucuuuccauagaauguucuaaaccauccugcggccucuacucugcauucaauuac

SEQ ID NO: 559 - RNA, 85 nt, Artificial Sequence
  Synthetic
gacguauguaccagguuccuggaacuggaaucucuuuccauagaauguucuaaaccauccugcggccucuacucugcauucaauu

SEQ ID NO: 560 - RNA, 85 nt, Artificial Sequence
  Synthetic
gacacguauguaccagguuccuggaacuggaaucucuuuccauagaauguucuaaaccauccugcggccucuacucugcauucaa

SEQ ID NO: 561 - RNA, 85 nt, Artificial Sequence
  Synthetic
gcaacacguauguaccagguuccuggaacuggaaucucuuuccauagaauguucuaaaccauccugcggccucuacucugcauuc

SEQ ID NO: 562 - RNA, 85 nt, Artificial Sequence
  Synthetic
gcccaacacguauguaccagguuccuggaacuggaaucucuuuccauagaauguucuaaaccauccugcggccucuacucugcau

SEQ ID NO: 563 - RNA, 85 nt, Artificial Sequence
  Synthetic
ggacccaacacguauguaccagguuccuggaacuggaaucucuuuccauagaauguucuaaaccauccugcggccucuacucugc

SEQ ID NO: 564 - RNA, 85 nt, Artificial Sequence
  Synthetic
guugacccaacacguauguaccagguuccuggaacuggaaucucuuuccauagaauguucuaaaccauccugcggccucuacucu

SEQ ID NO: 565 - RNA, 85 nt, Artificial Sequence
  Synthetic
gccuugacccaacacguauguaccagguuccuggaacuggaaucucuuuccauagaauguucuaaaccauccugcggccucuacu

SEQ ID NO: 566 - RNA, 85 nt, Artificial Sequence
  Synthetic
guuccuugacccaacacguauguaccagguuccuggaacuggaaucucuuuccauagaauguucuaaaccauccugcggccucua

SEQ ID NO: 567 - RNA, 85 nt, Artificial Sequence
  Synthetic
ggguuccuugacccaacacguauguaccagguuccuggaacuggaaucucuuuccauagaauguucuaaaccauccugcggccuc

SEQ ID NO: 568 - RNA, 85 nt, Artificial Sequence
  Synthetic
guugguuccuugacccaacacguauguaccagguuccuggaacuggaaucucuuuccauagaauguucuaaaccauccugcggcc

SEQ ID NO: 569 - RNA, 85 nt, Artificial Sequence
  Synthetic
gccuugguuccuugacccaacacguauguaccagguuccuggaacuggaaucucuuuccauagaauguucuaaaccauccugcgg

SEQ ID NO: 570 - RNA, 85 nt, Artificial Sequence
  Synthetic
ggcccuugguuccuugacccaacacguauguaccagguuccuggaacuggaaucucuuuccauagaauguucuaaaccauccugc

SEQ ID NO: 571 - RNA, 85 nt, Artificial Sequence
  Synthetic
gccgcccuugguuccuugacccaacacguauguaccagguuccuggaacuggaaucucuuuccauagaauguucuaaaccauccu

SEQ ID NO: 572 - RNA, 85 nt, Artificial Sequence
  Synthetic
gcgccgcccuugguuccuugacccaacacguauguaccagguuccuggaacuggaaucucuuuccauagaauguucuaaaccauc

SEQ ID NO: 573 - RNA, 85 nt, Artificial Sequence
  Synthetic
ggucgccgcccuugguuccuugacccaacacguauguaccagguuccuggaacuggaaucucuuuccauagaauguucuaaacca

SEQ ID NO: 574 - RNA, 30 nt, Artificial Sequence
  Synthetic
guaaugccuggcuugucgacgcauagucug

SEQ ID NO: 575 - RNA, 51 nt, Artificial Sequence
  Synthetic
gaaaacgcagguuccuccaguuucgggagcagcgcacgucucccuguaguc

SEQ ID NO: 576 - RNA, 51 nt, Artificial Sequence
  Synthetic
gacgcagguuccucuagcuucgggagcagcgcacgucucccuguagucaag

SEQ ID NO: 577 - RNA, 30 nt, Artificial Sequence; identical to SEQ ID NO: 574
  Synthetic

SEQ ID NO: 578 - RNA, 51 nt, Artificial Sequence; identical to SEQ ID NO: 480
  Synthetic

SEQ ID NO: 579 - RNA, 30 nt, Artificial Sequence; identical to SEQ ID NO: 574
  Synthetic

SEQ ID NO: 580 - RNA, 51 nt, Artificial Sequence
  Synthetic
gcaaggccacaaaauuauccacuguuuuuggaacagucuuuccgaagagac

SEQ ID NO: 581 - RNA, 51 nt, Artificial Sequence
  Synthetic
gccuguagccaaggccacaaaauuauccacuguuuuuggaacagucuuucc

SEQ ID NO: 582 - RNA, 51 nt, Artificial Sequence
  Synthetic
gcuuucucuccuguagccaaggccacaaaauuauccacuguuuuuggaaca

SEQ ID NO: 583 - RNA, 51 nt, Artificial Sequence
  Synthetic
ggccaaauccuuucucuccuguagccaaggccacaaaauuauccacuguuu

SEQ ID NO: 584 - RNA, 51 nt, Artificial Sequence
  Synthetic
guuuuuguagccaaauccuuucucuccuguagccaaggccacaaaauuauc

SEQ ID NO: 585 - RNA, 51 nt, Artificial Sequence
  Synthetic
gauuugcuguuuuuguagccaaauccuuucucuccuguagccaaggccaca

SEQ ID NO: 586 - RNA, 51 nt, Artificial Sequence
  Synthetic
gacgauggaauuugcuguuuuuguagccaaauccuuucucuccuguagcca

SEQ ID NO: 587 - RNA, 51 nt, Artificial Sequence
  Synthetic
gauagaauguucuaaacgauccugcggccucuacucugcauucaauuacau

SEQ ID NO: 588 - RNA, 51 nt, Artificial Sequence
  Synthetic
gauagaauguucuaaacaauccugcggccucuacucugcauucaauuacau

SEQ ID NO: 589 - RNA, 51 nt, Artificial Sequence
  Synthetic
gauagaauguucuaaacuauccugcggccucuacucugcauucaauuacau

SEQ ID NO: 590 - RNA, 51 nt, Artificial Sequence
  Synthetic
ggucccacgcggcccacagcugcaccaggaagaagggugcccagcacagca

SEQ ID NO: 591 - RNA, 51 nt, Artificial Sequence
  Synthetic
ggggucccacgcggcccacagcugcaccaggaagaagggugcccagcacag

SEQ ID NO: 592 - RNA, 51 nt, Artificial Sequence
  Synthetic
gccgggucccacgcggcccacagcugcaccaggaagaagggugcccagcac

SEQ ID NO: 593 - RNA, 51 nt, Artificial Sequence
  Synthetic
gggugaugacaucccaggcgaucguguggccuccaggagcccagagcagga

SEQ ID NO: 594 - RNA, 51 nt, Artificial Sequence
  Synthetic
gagggugaugacaucccaggcgaucguguggccuccaggagcccagagcag

SEQ ID NO: 595 - RNA, 51 nt, Artificial Sequence
  Synthetic
gaucagggugaugacaucccaggcgaucguguggccuccaggagcccagag

SEQ ID NO: 596 - RNA, 51 nt, Artificial Sequence
  Synthetic
gguggcuccauucacuccaaugcugagcacuuccacagaguggguuaaagc

SEQ ID NO: 597 - RNA, 51 nt, Artificial Sequence
  Synthetic
guuucuaauauauuuugccagacugauggacuauucucaauuaauaaugau

SEQ ID NO: 598 - RNA, 51 nt, Artificial Sequence
  Synthetic
gagauguugcuguggauccaguccacagccagcccgucgggggccuggaug

SEQ ID NO: 599 - RNA, 51 nt, Artificial Sequence
  Synthetic
gcaggccggcccagcugccaggugcaccugcucggagcaucgggccggauc

SEQ ID NO: 600 - RNA, 51 nt, Artificial Sequence
  Synthetic
gcaaagaaccucuggguccaaggguagaccaccagcagccugcccagggcc

SEQ ID NO: 601 - RNA, 51 nt, Artificial Sequence
  Synthetic
gaagagaaacuuaguuuccagggcuuugguagagggcaaagguugauagca

SEQ ID NO: 602 - RNA, 51 nt, Artificial Sequence
  Synthetic
gucagccuagugcagagccacugguaguuggugguuagaguuucaaguucc

SEQ ID NO: 603 - RNA, 51 nt, Artificial Sequence
  Synthetic
ggcucauugugaacaggccaguaauguccgggauggggcggcauaggcggg

SEQ ID NO: 604 - RNA, 51 nt, Artificial Sequence
  Synthetic
guagcuaaagaacuugaccaagacauaucaggauccaccucagcuccuaga

SEQ ID NO: 605 - RNA, 51 nt, Artificial Sequence
  Synthetic
ggggcauuguucugugcccaguccugcugguagaccugcuccccgguggcu

SEQ ID NO: 606 - RNA, 51 nt, Artificial Sequence
  Synthetic
gagaagucguucaugugccaccgugggagcguacagucaucauugaucuug

SEQ ID NO: 607 - RNA, 51 nt, Artificial Sequence
  Synthetic
gggauuaaugcugaacgcaccaaaguucaucccaccacccauauuacuacc

SEQ ID NO: 608 - RNA, 51 nt, Artificial Sequence
  Synthetic
gcuccaaaggcuuuccuccacuguugcaaaguuauugaaucccaagacaca

SEQ ID NO: 609 - RNA, 51 nt, Artificial Sequence
  Synthetic
gaugaaugaacgauuucccagaacucccuaaucagaacagagucccuggua

SEQ ID NO: 610 - RNA, 51 nt, Artificial Sequence
  Synthetic
ggagccucugccggagcccagagaacccgagagucagacagagccagcgcc

SEQ ID NO: 611 - RNA, 51 nt, Artificial Sequence
  Synthetic
ggcuuccguggagacacccaaucaauuugaagagaucuugaagugaugcca

SEQ ID NO: 612 - RNA, 51 nt, Artificial Sequence
  Synthetic
gugggacugcccuccucccauuugcagaugccgucguagaaucgcagcagg

SEQ ID NO: 613 - RNA, 51 nt, Artificial Sequence
  Synthetic
gcuucuucaauaguucuccagcuacacuggcaggcauaugcccguguuccu

SEQ ID NO: 614 - RNA, 51 nt, Artificial Sequence
  Synthetic
gauuccuuuucuucgucccaauucaccucaguggcuagucgaagaaugaag

SEQ ID NO: 615 - RNA, 51 nt, Artificial Sequence
  Synthetic
gcagcuucagcaccuuccagucagacuccugcuucaagcacugcagcagga

SEQ ID NO: 616 - RNA, 51 nt, Artificial Sequence
  Synthetic
gccauuugcuugcagugccacuccagaggauuccggauugccauaaauacu

SEQ ID NO: 617 - RNA, 51 nt, Artificial Sequence
  Synthetic
guucaauaguuuugguccaguaucguuuacagcccuucuugguagauuuca

SEQ ID NO: 618 - RNA, 51 nt, Artificial Sequence
  Synthetic
ggcaaccgucuucugaccaaauggcagaacauuuguccccaacuuuccacu

SEQ ID NO: 619 - RNA, 51 nt, Artificial Sequence
  Synthetic
gcgacuuuccaaugaaccacugaagcccagguaugacaaagccgaugaucu

SEQ ID NO: 620 - RNA, 51 nt, Artificial Sequence
  Synthetic
guuuacacucaugcuuccacagcuuuaacagaucauuugguuccuugauga

SEQ ID NO: 621 - RNA, 51 nt, Artificial Sequence
  Synthetic
gcuuaagcuuccguguccagccuucaggcaggguggggucaucauacaugg

SEQ ID NO: 622 - RNA, 51 nt, Artificial Sequence
  Synthetic
ggacagcugggcugauccaugaugucauccagaaacacuggggacccucag

SEQ ID NO: 623 - RNA, 51 nt, Artificial Sequence
  Synthetic
gucucaucucaacuuuccauauccguaucauggaaucauagcauccuguaa

SEQ ID NO: 624 - RNA, 51 nt, Artificial Sequence
  Synthetic
gcaugcagacgcgguuccacucgcagccacaguuccagcaccacucgagcc

SEQ ID NO: 625 - RNA, 51 nt, Artificial Sequence
  Synthetic
guugguuagggucaacccaguauucuccacucuugaguucaggauggcaga

SEQ ID NO: 626 - RNA, 51 nt, Artificial Sequence
  Synthetic
gcuacacuguccaacacccacucucgggucaccacaggugccucacacauc

SEQ ID NO: 627 - RNA, 51 nt, Artificial Sequence
  Synthetic
gcugcacuguguacccccagagcuccguguugccgacauccugggguggcu

SEQ ID NO: 628 - RNA, 51 nt, Artificial Sequence
  Synthetic
gagcuuccugccacucccaacagguuucacaguaagcgcguaucuguucca

SEQ ID NO: 629 - RNA, 51 nt, Artificial Sequence
  Synthetic
gacggcaagagcuuacccagucacuuguguggagacuuaaauacuugcaua

SEQ ID NO: 630 - RNA, 51 nt, Artificial Sequence; identical to SEQ ID NO: 580
  Synthetic

SEQ ID NO: 631 - RNA, 51 nt, Artificial Sequence; identical to SEQ ID NO: 581
  Synthetic

SEQ ID NO: 632 - RNA, 51 nt, Artificial Sequence; identical to SEQ ID NO: 582
  Synthetic

SEQ ID NO: 633 - RNA, 51 nt, Artificial Sequence; identical to SEQ ID NO: 583
  Synthetic

SEQ ID NO: 634 - RNA, 51 nt, Artificial Sequence; identical to SEQ ID NO: 584
  Synthetic

SEQ ID NO: 635 - RNA, 51 nt, Artificial Sequence; identical to SEQ ID NO: 585
  Synthetic

SEQ ID NO: 636 - RNA, 51 nt, Artificial Sequence; identical to SEQ ID NO: 586
  Synthetic

SEQ ID NO: 637 - RNA, 30 nt, Artificial Sequence; identical to SEQ ID NO: 574
  Synthetic

SEQ ID NO: 638 - RNA, 51 nt, Artificial Sequence; identical to SEQ ID NO: 480
  Synthetic

SEQ ID NO: 639 - RNA, 34 nt, Artificial Sequence
  Synthetic
gcaggguuuucccagucacgacguuguaaaguug

SEQ ID NO: 640 - RNA, 51 nt, Artificial Sequence
  Synthetic
gucaaggcacucuugcccacgccaccagcuccaacuaccacaaguuuauau

SEQ ID NO: 641 - RNA, 51 nt, Artificial Sequence
  Synthetic
gcaaagaucacccggcccacaucuucaucuccaauucguaggucaaaauac

SEQ ID NO: 642 - RNA, 51 nt, Artificial Sequence
  Synthetic
gcgccaccagcuccaaccaccacaaguuuauauucagucauuuucagcagg

SEQ ID NO: 643 - RNA, 51 nt, Artificial Sequence
  Synthetic
guuucuccaucaauuaccacuugcuuccuguaggaauccucuauuguugga

SEQ ID NO: 644 - RNA, 51 nt, Artificial Sequence; identical to SEQ ID NO: 582
  Synthetic

SEQ ID NO: 645 - RNA, 30 nt, Artificial Sequence; identical to SEQ ID NO: 574
  Synthetic

SEQ ID NO: 646 - RNA, 83 nt, Artificial Sequence
  Synthetic
ucuuuccauaggcccugaaaaagggccuguucuaaaccauccugcggccucuacucggcccugaaaaagggccauucaauuac

SEQ ID NO: 647 - RNA, 83 nt, Artificial Sequence
  Synthetic
cagcuggcgaggcccugaaaaagggccggggaugugccgcaaggcgauuaaguuggggcccugaaaaagggccacgccagggu

SEQ ID NO: 648 - RNA, 79 nt, Artificial Sequence
  Synthetic
guggaauaguauaacaauaugcuaaauguuguuauaguaucccacucuaaaccauccugcggggcccucuucagggccc

SEQ ID NO: 649 - RNA, 79 nt, Artificial Sequence
  Synthetic
guggaauaguauaacaauaugcuaaauguuguuauaguaucccacacccuggcguuacccagggcccucuucagggccc

SEQ ID NO: 650 - protein, 385 aa, Homo sapiens
QLHLPQVLADAVSRLVLGKFGDLTDNFSSPHARRKVLAGVVMTTGTDVKDAKVISVSTGTKCINGEYMSDRGLALNDCHAEIISRRSLLRFLYTQLELYLNNKDDQKRSIFQKSERGGFRLKENVQFHLYISTSPCGDARIFSPHEPILEEPADRHPNRKARGQLRTKIESGQGTIPVRSNASIQTWDGVLQGERLLTMSCSDKIARWNVVGIQGSLLSIFVEPIYFSSIILGSLYHGDHLSRAMYQRISNIEDLPPLYTLNKPLLSGISNAEARQPGKAPNFSVNWTVGDSAIEVINATTGKDELGRASRLCKHALYCRWMRVHGKVPSHLLRSKITKPNVYHESKLAAKEYQAAKARLFTAFIKAGLGAWVEKPTEQDQFSLT

SEQ ID NO: 651 - protein, 336 aa, Homo sapiens
SLGTGNRCVKGDSLSLKGETVNDCHAEIISRRGFIRFLYSELMKYNSQTAKDSIFEPAKGGEKLQIKKTVSFHLYISTAPCGDGALFDKSCSDRAMESTESRHYPVFENPKQGKLRTKVENGQGTIPVESSDIVPTWDGIRLGERLRTMSCSDKILRWNVLGLQGALLTHFLQPIYLKSVTLGYLFSQGHLTRAICCRVTRDGSAFEDGLRHPFIVNHPKVGRVSIYDSKRQSGKTKETSVNWCLADGYDLEILDGTRGTVDGPRNELSRVSKKNIFLLFKKLCSFRYRRDLLRLSYGEAKKAARDYETAKNYFKKGLKDMGYGNWISKPQEEKNF

SEQ ID NO: 652 - protein, 340 aa, Octopus vulgaris
SVGTGNRCLTGDHLSLEGNSVNDSHAEMITRRGFLRYLYRHLLEYDAEVPNDLFEKGERSICRIKTNITFHLYISTAPCGDGALFSPRDTDSSNAKMEEENKHIHNPTFSSSVQGLLRTKVEGGQGTIPIDADFTEQTWDGIQRGERLRTMSCSDKICRWNVVGLQGALLSHFIEPIYLDSLTLGYLYDHGHLARAVCCRIERGEASVNQLLPEGYRLNHPWLGRVTACDPPRETQKTKSLSINWCYDDEKSEVLDGTAGICYTAIEKNLFSRLTKHNLYEEFKRVCRKFDRNDLLTAPSYNKAKMMATPFQTAKNVMLKKLKENNCGTWVSKPIEEEMF

SEQ ID NO: 653 - protein, 340 aa, Sepia
SVGTGNRCLTGDRLSLEGNSVNDSHAEMVTRRGFLRYLYKHLLEYDPEKPHDLFEKGERSLCRIKTNITFHLYISTAPCGDGALFSPRDTDSSNVKVDEENKHVHNPTFSSSVQGLLRTKVEGGQGTIPIDADFTEQTWDGIQRGERLRTMSCSDKICRWNVVGLQGALLSHFVEPIYLESLTLGYLYDHGHLARAVCCRIERGEASVNQLLPEGYRLNHPWLGRVTACDPPRETQKTKSLSINWCYDDEKSEVLDGTAGICYTAIEKNLFSRLTKHSLYEEFKKVCQKFEREDLLNVTSYNKAKMMAIPFQTAKNVMLKKLKENNCGTWVSKPIEEEMF

SEQ ID NO: 654 - protein, 328 aa, Octopus vulgaris
GIGTGTKCINGEHMSDRGFGVNDCHAEIIARRCFLRYIYDQLELHLSDNSDVRNSSIFELRDKGGYQLKENIQFHLYISTAPCGDARIFSPHGQDVETGDRHPNRKARGQLRTKIESGQGTIPVRTSGVIQTWDGVLEGERLLTMSCSDKIARWNVLGIQGSLLSHFMNPIYLESIILGSLYHSDHLSRAMYSRISIIENLPEPFHLNRPFLSGISSPESRQPGKAPNFGINWRKEDETFEVINAMTGRVEGGSVSRICKQALFGRFMSLYGKLSSLTGQSVTTRPTHYSDAKAAVMEYQLAKQCVFQAFQKAGLGNWVQKPIEQDQF

SEQ ID NO: 655 - protein, 328 aa, Sepia
GIGTGTKCINGEYMNDRGFAVNDCHAEIIARRCFLRFIYDQLEMHLSEDPEVRGQSVFELRDGGGYKLKPNIHFHLYISTAPCGDARIFSPHGQDVETGDRHPNRKARGQLRTKIESGQGTIPVRSSGFIQTWDGVLEGERLLTMSCSDKIARWNVLGIQGALLCHFMHPIYLESIILGSLYHSDHLSRAVYCRIASIENLPDLFQLNRPFLSGISSPESRQPGKAPNFGINWRRNDDTFEVINAMTGRVEGGNMSRICKQALFDRFMNLYGRLSSLTGQSVTTRPTLYSEAKAAVMEYQLAKQCVFQAFQKAGLGNWVQKPIEQDQF

SEQ ID NO: 656 - protein, 328 aa, Doryteusthis opalescens
GIGTGTKCINGEYMNDRGFAVNDCHAEIIARRCFLRFIYDQLELHLSDNAEVRGQSIFELRDAGGYKLKPNIQFHLYISTAPCGDARIFSPHGQDVETGDRHPNRKARGQLRTKIESGQGTIPVRSSGFIQTWDGVLEGERLLTMSCSDKIARWNVLGVQGALLCHFMHPIYLESIILGSLYHSDHLSRAVYCRIAAIENLPDLFRLNRPFLSGISSPESRQPGKAPNFGINWRRNDDSFEVINAMTGRVEGGSMSRICKQALFDRFMNLYGKLSSLTGQSVTTRPALYSEAKATVMEYQLAKQCVFQAFQKAGLGNWVQKPIEQDQF

SEQ ID NO: 657 - DNA, 57 bp, Artificial Sequence
  Synthetic
gaatgcagagtagaggccgcaggatagtttagaacattctatggaaagagattccag

SEQ ID NO: 658 - DNA, 88 bp, Artificial Sequence
  Synthetic
ttgccgaatgtgtcagtatgtaattgaatgcagagtagaggccgcaggatagtttagaacattctatggaaagagattccagttccag

SEQ ID NO: 659 - DNA, 88 bp, Artificial Sequence
  Synthetic
aacggcttacacagtcatacattaacttacgtctcatctccggcgtcctatcaaatcttgtaagatacctttctctaaggtcaaggtc

SEQ ID NO: 660 - DNA, 51 bp, Artificial Sequence
  Synthetic
cttacgtctcatctccggcgtcctatcaaatcttgtaagatacctttctct

SEQ ID NO: 661 - RNA, 19 nt, Artificial Sequence
  Synthetic
augacauggacugauuugc

SEQ ID NO: 662 - RNA, 19 nt, Artificial Sequence
  Synthetic
  modified_base (6)..(6): n at position 6 represents inosine
  misc_feature (6)..(6): n is a, c, g, or u
augacnuggacugauuugc

SEQ ID NO: 663 - RNA, 19 nt, Artificial Sequence
  Synthetic
uacugcaccggacgaaacg

SEQ ID NO: 664 - RNA, 19 nt, Artificial Sequence
  Synthetic
uacugcaccggacgaaacg

SEQ ID NO: 665 - RNA, 19 nt, Artificial Sequence
  Synthetic
augacauggacugauuugc

SEQ ID NO: 666 - RNA, 19 nt, Artificial Sequence
  Synthetic
  modified_base (6)..(6): n at position 6 represensts inosine
  misc_feature (6)..(6): n is a, c, g, or u
augacnuggacugauuugc

SEQ ID NO: 667 - RNA, 19 nt, Artificial Sequence
  Synthetic
uacugcaccagacaaaacg

SEQ ID NO: 668 - RNA, 19 nt, Artificial Sequence
  Synthetic
uacugcaccagacaaaacg

SEQ ID NO: 669 - RNA, 19 nt, Artificial Sequence
  Synthetic
augacauggacugauuugc

SEQ ID NO: 670 - RNA, 19 nt, Artificial Sequence
  Synthetic
  modified_base (6)..(6): n at position 6 represents inosine
  misc_feature (6)..(6): n is a, c, g, or u
  modified_base (14)..(14): n at position 6 represents inosine
  misc_feature (14)..(14): n is a, c, g, or u
augacnuggacugnuuugc

SEQ ID NO: 671 - RNA, 19 nt, Artificial Sequence
  Synthetic
uacugcaccggaccaaacg

SEQ ID NO: 672 - RNA, 19 nt, Artificial Sequence
  Synthetic
uacugcaccggaccaaacg

SEQ ID NO: 673 - DNA, 36 bp, Artificial Sequence
  Synthetic
tggaggtgctcaaagagatggaagccaatgcccgga

SEQ ID NO: 674 - DNA, 34 bp, Artificial Sequence
  Synthetic
agagatggaagccaatgcccggaaagctggctgc

SEQ ID NO: 675 - DNA, 36 bp, Artificial Sequence
  Synthetic
  misc_feature (1)..(1): n is a, c, g, or t
nggaggtgctcaaagagatggaagccaatgcccgga

SEQ ID NO: 676 - DNA, 36 bp, Artificial Sequence
  Synthetic
  misc_feature (2)..(2): n is a, c, g, or t
tngaggtgctcaaagagatggaagccaatgcccgga

SEQ ID NO: 677 - DNA, 36 bp, Artificial Sequence
  Synthetic
  misc_feature (3)..(3): n is a, c, g, or t
tgnaggtgctcaaagagatggaagccaatgcccgga

SEQ ID NO: 678 - DNA, 36 bp, Artificial Sequence
  Synthetic
  misc_feature (4)..(4): n is a, c, g, or t
tggnggtgctcaaagagatggaagccaatgcccgga

SEQ ID NO: 679 - DNA, 36 bp, Artificial Sequence
  Synthetic
  misc_feature (4)..(4): n is a, c, g, or t
  misc_feature (36)..(36): n is a, c, g, or t
tggnggtgctcaaagagatggaagccaatgcccggn

SEQ ID NO: 680 - DNA, 34 bp, Artificial Sequence
  Synthetic
  misc_feature (1)..(1): n is a, c, g, or t
ngagatggaagccaatgcccggaaagctggctgc

SEQ ID NO: 681 - DNA, 34 bp, Artificial Sequence
  Synthetic
  misc_feature (2)..(2): n is a, c, g, or t
anagatggaagccaatgcccggaaagctggctgc

SEQ ID NO: 682 - DNA, 34 bp, Artificial Sequence
  Synthetic
  misc_feature (3)..(3): n is a, c, g, or t
agngatggaagccaatgcccggaaagctggctgc

SEQ ID NO: 683 - DNA, 34 bp, Artificial Sequence
  Synthetic
  misc_feature (4)..(4): n is a, c, g, or t
aganatggaagccaatgcccggaaagctggctgc

SEQ ID NO: 684 - DNA, 34 bp, Artificial Sequence
  Synthetic
  misc_feature (34)..(34): n is a, c, g, or t
agagatggaagccaatgcccggaaagctggctgn

SEQ ID NO: 685 - DNA, 36 bp, Artificial Sequence
  Synthetic
  misc_feature (1)..(2): n is a, c, g, or t
nngaggtgctcaaagagatggaagccaatgcccgga

SEQ ID NO: 686 - DNA, 36 bp, Artificial Sequence
  Synthetic
  misc_feature (1)..(1): n is a, c, g, or t
  misc_feature (3)..(3): n is a, c, g, or t
ngnaggtgctcaaagagatggaagccaatgcccgga

SEQ ID NO: 687 - DNA, 36 bp, Artificial Sequence
  Synthetic
  misc_feature (1)..(1): n is a, c, g, or t
  misc_feature (4)..(4): n is a, c, g, or t
nggnggtgctcaaagagatggaagccaatgcccgga

SEQ ID NO: 688 - DNA, 36 bp, Artificial Sequence
  Synthetic
  misc_feature (1)..(1): n is a, c, g, or t
  misc_feature (5)..(5): n is a, c, g, or t
nggangtgctcaaagagatggaagccaatgcccgga

SEQ ID NO: 689 - DNA, 36 bp, Artificial Sequence
  Synthetic
  misc_feature (35)..(36): n is a, c, g, or t
tggaggtgctcaaagagatggaagccaatgcccgnn

SEQ ID NO: 690 - DNA, 34 bp, Artificial Sequence
  Synthetic
  misc_feature (1)..(2): n is a, c, g, or t
nnagatggaagccaatgcccggaaagctggctgc

SEQ ID NO: 691 - DNA, 34 bp, Artificial Sequence
  Synthetic
  misc_feature (1)..(1): n is a, c, g, or t
  misc_feature (3)..(3): n is a, c, g, or t
ngngatggaagccaatgcccggaaagctggctgc

SEQ ID NO: 692 - DNA, 34 bp, Artificial Sequence
  Synthetic
  misc_feature (1)..(1): n is a, c, g, or t
  misc_feature (4)..(4): n is a, c, g, or t
nganatggaagccaatgcccggaaagctggctgc

SEQ ID NO: 693 - DNA, 34 bp, Artificial Sequence
  Synthetic
  misc_feature (1)..(1): n is a, c, g, or t
  misc_feature (5)..(5): n is a, c, g, or t
ngagntggaagccaatgcccggaaagctggctgc

SEQ ID NO: 694 - DNA, 34 bp, Artificial Sequence
  Synthetic
  misc_feature (33)..(34): n is a, c, g, or t
agagatggaagccaatgcccggaaagctggctnn

SEQ ID NO: 695 - RNA, 55 nt, Artificial Sequence
  Synthetic
aaugcagaguagaggccgcaggauaguuuagaacauucuauggaaagagauucca

SEQ ID NO: 696 - DNA, 48 bp, Artificial Sequence
  Synthetic
cgagcctcacacgtgctgcttgactacagggagacgtgcgctgctccc

SEQ ID NO: 697 - protein, 16 aa, Artificial Sequence
  Synthetic
RASHVLLDYRETCAAP

SEQ ID NO: 698 - DNA, 48 bp, Artificial Sequence
  Synthetic
cgagcctcacacgtggaaagggactacagggagacgtgcgctgctccc

SEQ ID NO: 699 - DNA, 48 bp, Artificial Sequence
  Synthetic
cgagcctcacacaagacccttgactacagggagacgtgcgctgctccc

SEQ ID NO: 700 - RNA, 45 nt, Artificial Sequence
  Synthetic
auugaaugcagaguagaggccgcaggauaguuuagaacauucuau

SEQ ID NO: 701 - RNA, 66 nt, Artificial Sequence
  Synthetic
ucuaaaccauccugcggccucuacucugcaguuguggaagguccaguuuugggggcuauuacaaca

SEQ ID NO: 702 - DNA, 105 bp, Artificial Sequence
  Synthetic
tgccgaaugugucaguauguaauugaaugcagaguagaggccgcaggauaguuuagaacauucuauggaaagagauuccaguuccaggaaccugguacauacgug

SEQ ID NO: 703 - protein, 28 aa, Artificial Sequence
  Synthetic
CRMCQYVIECRVEAAGFRTFYGKRFQFQ

SEQ ID NO: 704 - protein, 356 aa, Homo sapiens
MGSGGGGSEGAPKKKRKVGSSLGTGNRCVKGDSLSLKGETVNDCHAEIISRRGFIRFLYSELMKYNSQTAKDSIFEPAKGGEKLQIKKTVSFHLYISTAPCGDGALFDKSCSDRAMESTESRHYPVFENPKQGKLRTKVENGQGTIPVESSDIVPTWDGIRLGERLRTMSCSDKILRWNVLGLQGALLTHFLQPIYLKSVTLGYLFSQGHLTRAICCRVTRDGSAFEDGLRHPFIVNHPKVGRVSIYDSKRQSGKTKETSVNWCLADGYDLEILDGTRGTVDGPRNELSRVSKKNIFLLFKKLCSFRYRRDLLRLSYGEAKKAARDYETAKNYFKKGLKDMGYGNWISKPQEEKNF

SEQ ID NO: 705 - RNA, 65 nt, Artificial Sequence
  Synthetic
ucgucuaugugcugugcugggcacccuucuuccuggugcagcuguaggccgcgugggacccggag

SEQ ID NO: 706 - RNA, 50 nt, Artificial Sequence
  Synthetic
gucccacgcggcccacagcugcaccaggaagaagggugcccagcacagca

SEQ ID NO: 707 - RNA, 50 nt, Artificial Sequence
  Synthetic
gggucccacgcggcccacagcugcaccaggaagaagggugcccagcacag

SEQ ID NO: 708 - RNA, 50 nt, Artificial Sequence
  Synthetic
ccgggucccacgcggcccacagcugcaccaggaagaagggugcccagcac

SEQ ID NO: 709 - RNA, 65 nt, Artificial Sequence
  Synthetic
ccucaacuuccugcucugggcuccuggaggccacacgaucgccuaggaugucaucacccugaugg

SEQ ID NO: 710 - RNA, 50 nt, Artificial Sequence
  Synthetic
ggugaugacaucccaggcgaucguguggccuccaggagcccagagcagga

SEQ ID NO: 711 - RNA, 50 nt, Artificial Sequence
  Synthetic
agggugaugacaucccaggcgaucguguggccuccaggagcccagagcag

SEQ ID NO: 712 - RNA, 50 nt, Artificial Sequence
  Synthetic
aucagggugaugacaucccaggcgaucguguggccuccaggagcccagag

SEQ ID NO: 713 - RNA, 99 nt, Artificial Sequence
  Synthetic
cccaggugcgggagagaggccugcugaaaaugacugaauauaaacuugugguaguuggagcugguggcguaggcaagagugccuugacgauacagcuaa

SEQ ID NO: 714 - RNA, 50 nt, Artificial Sequence
  Synthetic
caccacaaguuuauauucagucauuuucagcaggccucucucccgcaccu

SEQ ID NO: 715 - RNA, 50 nt, Artificial Sequence
  Synthetic
gcuccaaccaccacaaguuuauauucagucauuuucagcaggccucucuc

SEQ ID NO: 716 - RNA, 50 nt, Artificial Sequence
  Synthetic
cgccaccagcuccaaccaccacaaguuuauauucagucauuuucagcagg

SEQ ID NO: 717 - RNA, 50 nt, Artificial Sequence
  Synthetic
cuugccuacgccaccagcuccaaccaccacaaguuuauauucagucauuu

SEQ ID NO: 718 - RNA, 50 nt, Artificial Sequence
  Synthetic
aaggcacucuugccuacgccaccagcuccaaccaccacaaguuuauauuc

SEQ ID NO: 719 - RNA, 98 nt, Artificial Sequence
  Synthetic
guacgucaaggcacucuugccuacgccaccagcuccaaccaccacaaguguacgucaaggcacucuugccuacgccaccagcuccaaccaccacaagu

SEQ ID NO: 720 - RNA, 50 nt, Artificial Sequence
  Synthetic
aauuagcuguaucgucaaggcacucuugccuacgccaccagcuccaacca

SEQ ID NO: 721 - DNA, 44 bp, Artificial Sequence
  Synthetic
tatgtaattgaatgcagagtagaggccgcaggatagtttagaac

SEQ ID NO: 722 - RNA, 39 nt, Artificial Sequence
  Synthetic
  misc_feature (4)..(5): n is a, c, g, or u
  misc_feature (36)..(39): n is a, c, g, or u
augnnuugccaccgacgacaccgugaggauaaauunnnn

SEQ ID NO: 723 - RNA, 36 nt, Artificial Sequence
  Synthetic
uggaggugcucaaagagauggaagccaaugcccgga

SEQ ID NO: 724 - RNA, 36 nt, Artificial Sequence
  Synthetic
  misc_feature (1)..(1): n is a, c, g, or u
nggaggugcucaaagagauggaagccaaugcccgga

SEQ ID NO: 725 - RNA, 36 nt, Artificial Sequence
  Synthetic
  misc_feature (2)..(2): n is a, c, g, or u
ungaggugcucaaagagauggaagccaaugcccgga

SEQ ID NO: 726 - RNA, 36 nt, Artificial Sequence
  Synthetic
  misc_feature (3)..(3): n is a, c, g, or u
ugnaggugcucaaagagauggaagccaaugcccgga

SEQ ID NO: 727 - RNA, 36 nt, Artificial Sequence
  Synthetic
  misc_feature (4)..(4): n is a, c, g, or u
uggnggugcucaaagagauggaagccaaugcccgga

SEQ ID NO: 728 - RNA, 36 nt, Artificial Sequence
  Synthetic
  misc_feature (18)..(18): n is a, c, g, or u
uggaggugcucaaagagnuggaagccaaugcccgga

SEQ ID NO: 729 - RNA, 36 nt, Artificial Sequence
  Synthetic
  misc_feature (36)..(36): n is a, c, g, or u
uggaggugcucaaagagauggaagccaaugcccggn

SEQ ID NO: 730 - RNA, 36 nt, Artificial Sequence
  Synthetic
  misc_feature (1)..(2): n is a, c, g, or u
nngaggugcucaaagagauggaagccaaugcccgga

SEQ ID NO: 731 - RNA, 36 nt, Artificial Sequence
  Synthetic
  misc_feature (1)..(1): n is a, c, g, or u
  misc_feature (3)..(3): n is a, c, g, or u
ngnaggugcucaaagagauggaagccaaugcccgga

SEQ ID NO: 732 - RNA, 36 nt, Artificial Sequence
  Synthetic
  misc_feature (1)..(1): n is a, c, g, or u
  misc_feature (4)..(4): n is a, c, g, or u
nggnggugcucaaagagauggaagccaaugcccgga

SEQ ID NO: 733 - RNA, 36 nt, Artificial Sequence
  Synthetic
  misc_feature (1)..(1): n is a, c, g, or u
  misc_feature (5)..(5): n is a, c, g, or u
nggangugcucaaagagauggaagccaaugcccgga

SEQ ID NO: 734 - RNA, 36 nt, Artificial Sequence
  Synthetic
  misc_feature (14)..(14): n is a, c, g, or u
  misc_feature (18)..(18): n is a, c, g, or u
uggaggugcucaangagnuggaagccaaugcccgga

SEQ ID NO: 735 - RNA, 36 nt, Artificial Sequence
  Synthetic
  misc_feature (35)..(36): n is a, c, g, or u
uggaggugcucaaagagauggaagccaaugcccgnn

SEQ ID NO: 736 - RNA, 34 nt, Artificial Sequence
  Synthetic
agagauggaagccaaugcccggaaagcuggcugc

SEQ ID NO: 737 - DNA, 107 bp, Cypridinia luciferase
tgccgaaugugucaguauguaauugaaugcagaguagaggccgcaggauaguuuagaacauucuauggaaagagauuccaguuccaggaaccugguacauacguguu

SEQ ID NO: 738 - RNA, 30 nt, Artificial Sequence
  Synthetic
cauccugcggccucuacucugcauucaauu

SEQ ID NO: 739 - RNA, 30 nt, Artificial Sequence
  Synthetic
aaaccauccugcggccucuacucugcauuc

SEQ ID NO: 740 - RNA, 30 nt, Artificial Sequence
  Synthetic
uucuaaaccauccugcggccucuacucugc

SEQ ID NO: 741 - RNA, 30 nt, Artificial Sequence
  Synthetic
aauguucuaaaccauccugcggccucuacu

SEQ ID NO: 742 - RNA, 30 nt, Artificial Sequence
  Synthetic
auagaauguucuaaaccauccugcggccuc

SEQ ID NO: 743 - RNA, 30 nt, Artificial Sequence
  Synthetic
uuccauagaauguucuaaaccauccugcgg

SEQ ID NO: 744 - RNA, 30 nt, Artificial Sequence
  Synthetic
cucuuuccauagaauguucuaaaccauccu

SEQ ID NO: 745 - RNA, 30 nt, Artificial Sequence
  Synthetic
gaaucucuuuccauagaauguucuaaacca

SEQ ID NO: 746 - RNA, 104 nt, Homo sapiens
uuggucucuucggaaagacuguuccaaaaacaguggauaauuuuguggccuuagcuacaggagagaaaggauuuggcuacaaaaacagcaaauuccaucgugua

SEQ ID NO: 747 - RNA, 50 nt, Artificial Sequence
  Synthetic
caaggccacaaaauuauccacuguuuuuggaacagucuuuccgaagagac

SEQ ID NO: 748 - RNA, 50 nt, Artificial Sequence
  Synthetic
ccuguagccaaggccacaaaauuauccacuguuuuuggaacagucuuucc

SEQ ID NO: 749 - RNA, 50 nt, Artificial Sequence
  Synthetic
cuuucucuccuguagccaaggccacaaaauuauccacuguuuuuggaaca

SEQ ID NO: 750 - RNA, 50 nt, Artificial Sequence
  Synthetic
gccaaauccuuucucuccuguagccaaggccacaaaauuauccacuguuu

SEQ ID NO: 751 - RNA, 50 nt, Artificial Sequence
  Synthetic
uuuuuguagccaaauccuuucucuccuguagccaaggccacaaaauuauc

SEQ ID NO: 752 - RNA, 50 nt, Artificial Sequence
  Synthetic
auuugcuguuuuuguagccaaauccuuucucuccuguagccaaggccaca

SEQ ID NO: 753 - RNA, 50 nt, Artificial Sequence
  Synthetic
acgauggaauuugcuguuuuuguagccaaauccuuucucuccuguagcca

SEQ ID NO: 754 - RNA, 56 nt, Artificial Sequence
  Synthetic
aguauguaauugaaugcagaguagaggccgcaggauaguuuagaacauucuaugga

SEQ ID NO: 755 - RNA, 50 nt, Artificial Sequence
  Synthetic
  misc_feature (17)..(17): n is a, c, g, or u
auagaauguucuaaacnauccugcggccucuacucugcauucaauuacau

SEQ ID NO: 756 - RNA, 59 nt, Artificial Sequence
  Synthetic
auguaauugaaugcagaguagaggccgcaggauaguuuagaacauucuauggaaagaga

SEQ ID NO: 757 - RNA, 83 nt, Artificial Sequence; identical to SEQ ID NO: 646
  Synthetic

SEQ ID NO: 758 - RNA, 21 nt, Artificial Sequence
  Synthetic
ggccgcaggauaguuuagaac

SEQ ID NO: 759 - RNA, 52 nt, Artificial Sequence
  Synthetic
aaauguuguuauaguaucccaccucuaaaccauccugcggggccgggcccuu

SEQ ID NO: 760 - RNA, 26 nt, Artificial Sequence
  Synthetic
accgguggaauaguauaacaauaugc

SEQ ID NO: 761 - DNA, 74 bp, Artificial Sequence
  Synthetic
gccagagatgaaggaccagggtggctcaggggaagggctgagccgcagcgccaatggatttccatacagagagg

SEQ ID NO: 762 - protein, 668 aa, Fusobacterium necrophorum; identical to SEQ ID NO: 158

SEQ ID NO: 763 - protein, 796 aa, Tissierella sp.
MEKDKKGEKIDISQEMIEEDLRKILILFSRLRHSMVHYDYEFYQALYSGKDFVISDKNNLENRMISQLLDLNIFKELSKVKLIKDKAISNYLDKNTTIHVLGQDIKAIRLLDIYRDICGSKNGFNKFINTMITISGEEDREYKEKVIEHFNKKMENLSTYLEKLEKQDNAKRNNKRVYNLLKQKLIEQQKLKEWFGGPYVYDIHSSKRYKELYIERKKLVDRHSKLFEEGLDEKNKKELTKINDELSKLNSEMKEMTKLNSKYRLQYKLQLAFGFILEEFDLNIDTFINNFDKDKDLIISNFMKKRDIYLNRVLDRGDNRLKNIIKEYKFRDTEDIFCNDRDNNLVKLYILMYILLPVEIRGDFLGFVKKNYYDMKHVDFIDKKDKEDKDTFFHDLRLFEKNIRKLEITDYSLSSGFLSKEHKVDIEKKINDFINRNGAMKLPEDITIEEFNKSLILPIMKNYQINFKLLNDIEISALFKIAKDRSITFKQAIDEIKNEDIKKNSKKNDKNNHKDKNINFTQLMKRALHEKIPYKAGMYQIRNNISHIDMEQLYIDPLNSYMNSNKNNITISEQIEKIIDVCVTGGVTGKELNNNIINDYYMKKEKLVFNLKLRKQNDIVSIESQEKNKREEFVFKKYGLDYKDGEINIIEVIQKVNSLQEELRNIKETSKEKLKNKETLFRDISLINGTIRKNINFKIKEMVLDIVRMDEIRHINIHIYYKGENYTRSNIIKFKYAIDGENKKYYLKQHEINDINLELKDKFVTLICNMDKHPNKNKQTINLESNYIQNVKFIIP

SEQ ID NO: 764 - protein, 897 aa, Fusobacterium ulcerans; identical to SEQ ID NO: 160

SEQ ID NO: 765 - protein, 919 aa, Cetobacterium sp. ZOR0034
MEEIKHKKNKSSIIRVIVSNYDMTGIKEIKVLYQKQGGVDTFNLKTIINLESGNLEIISCKPKEREKYRYEFNCKTEINTISITKKDKVLKKEIRKYSLELYFKNEKKDTVVAKVTDLLKAPDKIEGERNHLRKLSSSTERKLLSKTLCKNYSEISKTPIEEIDSIKIYKIKRFLNYRSNFLIYFALINDFLCAGVKEDDINEVWLIQDKEHTAFLENRIEKITDYIFDKLSKDIENKKNQFEKRIKKYKTSLEELKTETLEKNKTFYIDSIKTKITNLENKITELSLYNSKESLKEDLIKIISIFTNLRHSLMHYDYKSFENLFENIENEELKNLLDLNLFKSIRMSDEFKTKNRTNYLDGTESFTIVKKHQNLKKLYTYYNNLCDKKNGFNTFINSFFVTDGIENTDFKNLIILHFEKEMEEYKKSIEYYKIKISNEKNKSKKEKLKEKIDLLQSELINMREHKNLLKQIYFFDIHNSIKYKELYSERKNLIEQYNLQINGVKDVTAINHINTKLLSLKNKMDKITKQNSLYRLKYKLKIAYSFLMIEFDGDVSKFKNNFDPTNLEKRVEYLDKKEEYLNYTAPKNKFNFAKLEEELQKIQSTSEMGADYLNVSPENNLFKFYILTYIMLPVEFKGDFLGFVKNHYYNIKNVDFMDESLLDENEVDSNKLNEKIENLKDSSFFNKIRLFEKNIKKYEIVKYSVSTQENMKEYFKQLNLDIPYLDYKSTDEIGIFNKNMILPIFKYYQNVFKLCNDIEIHALLALANKKQQNLEYAIYCCSKKNSLNYNELLKTFNRKTYQNLSFIRNKIAHLNYKELFSDLFNNELDLNTKVRCLIEFSQNNKFDQIDLGMNFINDYYMKKTRFIFNQRRLRDLNVPSKEKIIDGKRKQQNDSNNELLKKYGLSRTNIKDIFNKAWY

SEQ ID NO: 766 - protein, 1110 aa, Fusobacterium necrophorum; identical to SEQ ID NO: 157

SEQ ID NO: 767 - protein, 1111 aa, Fusobacterium necrophorum; identical to SEQ ID NO: 156

SEQ ID NO: 768 - protein, 1111 aa, Anaerosalibacter massiliensis; identical to SEQ ID NO: 161

SEQ ID NO: 769 - protein, 1111 aa, Fusobacterium necrophorum
MEKFRRQNRNSIIKIIISNYDTKGIKELKVRYRKQAQLDTFIIKTEIVNNDIFIKSIIEKAREKYRYSFLFDGEEKYHFKNKSSVEIVKKDIFSQTPDNMIRNYKITLKISEKNPRVVEAEIEDLMNSTILKDGRRSARREKSVTERKLIEEKVAENYSLLANCPMEEVDSIKIYKIKRFLTYRSNMLLYFASINSFLCEGIKGKENETEEIWHLKDNDVRKEKVKENFKNKLIQSTENYNSSLKNQIEEKEKLLRKESKKGAFYRTIIKKLQQERIKELSEKSLTEDCEKIIKLYSKLRHSLMHYDYQYFENLFENKETPELKDKLDLHLFKSLPLIRKMKLNNKVNYLEDGDTLFVLQKTKKAKTLYQIYDALCEQKNGFNKFINDFFVSDGEENTVFKQIINEKFQSEMEFLGKRISESEEKNPKLKKKFDSMKAHFHNINSEDTKEAYFWDIHSSSNYKTKYNERKNLVNEYTELLGSSKEKKLLREEITQINRKLLKLKQEMEEITKKNSLFRLEYKMKMAFGFLFCEFDGNISRFKDEFDASNQEKIIQYHKNGEKYLTYFLKEEEKEKFNLKKLQETIQKTGKENWLLPQNKNNLFKFYLLTYLLLPYELKGDFLGFVKKHYYDIKNVDFMDENQSSKIIESKEDDFYHKIRLFEKNTKKYEIVKYSIVPDEKLKQYFKDLGIDTKYLILEQKSEVSGEKNKKVSLKNNGMFNKTILLFVFKYYQIAFKLFNDIELYSLFFLREKSGKPFEVFLKELKDKMIGKQLNFGQLLYVIYEVLVKNKDLSEILSERIDYRKDMCFSAEIADLRNFLSHLNYSKFLDNFMKINTNKSDENKEVLIPSIKIQKMIKFIEECNLQSQIDFDFNFVNDFYMRKEKMFFIQLKQIFPDINSTEKQKMNEKEEILRNRYHLTDKKNEQIKDEHEAQSQLYEKILSLQKIYSSDKNNFYGRLKEEKLLFLGKQGKKKLSMEEIKDKIAGDISDLLGILKKEITRDIKDKLTEKFRYCEEKLLNLSFYNHQDKKKEESIRVFLIRDKNSDNFKFESILDDGSNKIFISKNGKEITIQCCDKVLETLMIEKNTLKISSNGKIISLVPHYSYSIDVKY

SEQ ID NO: 770 - protein, 1115 aa, Fusobacterium necrophorum; identical to SEQ ID NO: 155

SEQ ID NO: 771 - protein, 1121 aa, Fusobacterium perfoetens; identical to SEQ ID NO: 159

SEQ ID NO: 772 - protein, 1137 aa, Fusobacterium necrophorum
MEKFRRQNRNSIIKIIISNYDTKGIKELKVRYRKQAQLDTFIIKTEIVNNDIFIKSIIEKAREKYRYSFLFDGEEKYHFKNKSSVEIVKKDIFSQTPDNMIRNYKITLKISEKNPRVVEAEIEDLMNSTILKDGRRSARREKSMTERKLIEEKVAKNYSLLANCPMEEVDSIKIYKIKRFLTYRSNMLLYFASINSFLCEGIKGKDNETEEIWHLKDNDVRKEKVRENFKNKLIQSTENYNSSLKNQIEEKEKLLRKEFKKGAFYRTIIKKLQQERIKELSEKSLTEDCEKIIKLYSKLRHSLMHYDYQYFENLFENKKNDDLMKDLNLDLFKSLPLIRKMKLNNKVNYLEDGDTLFVLQKTKKAKTLYQIYDALCEQKNGFNKFINDFFVSDGEENTVFKQIINEKFQSEMEFLEKRISESEKKNEKLKKKLDSMKAHFRNINSEDTKEAYFWDIHSSRNYKTKYNERKNLVNEYTELLGSSKEKKLLREEITKINRQLLKLKQEMEEITKKNSLFRLEYKMKIAFGFLFCEFDGNISKFKDEFDASNQEKIIQYHKNGEKYLTSFLKEEEKEKFNLEKMQKIIQKTEEEDWLLPETKNNLFKFYLLTYLLLPYELKGDFLGFVKKHYYDIKNVDFIDENQNNIQVSQTVEKQEDYFYHKIRLFEKNTKKYEIVKYSIVPNEKLKQYFEDLGIDIKYLTGSVESGEKWLGENLGIDIKYLTVEQKSEVSEEKNKKVSLKNNGMFNKTILLFVFKYYQIAFKLFNDIELYSLFFLREKSGKPLEIFRKELESKMKDGYLNFGQLLYVVYEVLVKNKDLDKILSKKIDYRKDKSFSPEIAYLRNFLSHLNYSKFLDNFMKINTNKSDENKEVLIPSIKIQKMIQFIEKCNLQNQIDFDFNFVNDFYMRKEKMFFIQLKQIFPDINSTEKQKMNEKEEILRNRYHLTDKKNEQIKDEHEAQSQLYEKILSLQKIYSSDKNNFYGRLKEEKLLFLEKQGKKKLSMEEIKDKIAGDISDLLGILKKEITRDIKDKLTEKFRYCEEKLLNLSFYNHQDKKKEESIRVFLIRDKNSDNFKFESILDDGSNKIFISKNGKEITIQCCDKVLETLIIEKNTLKISSNGKIISLIPHYSYSIDVKY

SEQ ID NO: 773 - protein, 1158 aa, Fusobacterium varium
MENKNKPNRGSIVRIIISNYDMKGIKELKVRYRKQAQLDTFILQTTLDKSNNSILINDFRVKAREKYRYSFTYDGKEKFSVPSNSIIVTKIDNAAPEKSKEIRKYKITLGIDEKCKTGSMITAAIEDLLEDDRVREGIRNPRRKASKTERKLITESICHNYAQITQCPVEEIDAVKIYKVKRFLSYRSNMLLFFALINDFLCKNLKNEKGEKINEIWEMENKGNNKKIDFDENYNILVAQIKEYFTKEIENYNNRIDNIIDKKELLKYSEEKEESEKNKKLEELNKLESQKLKILTDEEIKADVIKIIKIFSDLRHSLMHYEYKYFENLFENKKNEELAELLNLNLFKNLTLLRQMKIENKTNYLEGDEKFNILGKDVRAKNALGHYDLLVEQKNGFNNFINSFFVQDGTENLEFKKFIDENFIKAQKELEEDIKNCKESVKKLEKKLKENPKKSEDLEKKLEKKQKKLKELKKELEKMKQHYKRLNCAYVWDIHSSTVYKKLYNERKNLIEKYNKQLNGLQDKNAITGINAQLLRIKKEMEEITKSNSLFRLKYKMQIAYAFLEMEYEGNIAKFKNEFDCSKTEKIQEWLEKSEEYLNYCMEKEEDGKNYKFHFKEISEIKDTHNEEWLENTSENNLFKFYILTYLLLPMEFKGDFLGVVKKHYYDIKNVDFTDESEKELSQEQIDKMIGDSFFHKIRLFEKNTKRYEIIKYSILTSDEIKKYFELLELKVPYLEYKGIDEIGIFNKNIILPIFKYYQIIFRLYNDLEIHGLFNVSFDINKILSDLKSYGNENINFREFLYVIKQNNNSSTEEEYQKIWEKLESKYLKEPLLTPEKKEINKKTEKELKKLDGISFLRNKISHLEYEKIIEGVLKTAVNGENKKTSETNADKVFLNEKIKKIINFIKENELDKIELGFNFINDFFMKKEQFMFGQIKQVKEGNSDSITTERKRKEENNKRLKITYGLNYNNLSKIYEFSNTLREIVNSPLFLKDSTLLKKVDLSKVMLKEKPICSLQYENNTKLEDDIKRILLKDSSDIMGIYKAEVVKKLKEKLVLIFKYDEEKKIYVTVYDTSKAVPENISKEILVKRNNSKEEYFFEDNKKKYTTQYYTLEITKENELKVIPAKKLEGKEFKTEKKEENKLMLNNHYCFNVKIIY

SEQ ID NO: 774 - DNA, 50 bp, Artificial Sequence
  Synthetic
ttcatcttgggcgtgcacttgatgtgggacaggcagatcagacagcccct

SEQ ID NO: 775 - DNA, 50 bp, Artificial Sequence
  Synthetic
ttcatcttgggcgtgcccttgatgtgggacaggcagatcagacagcccct

SEQ ID NO: 776 - DNA, 50 bp, Artificial Sequence
  Synthetic
ttcatcttgggcgtgctcttgatgtgggacaggcagatcagacagcccct

SEQ ID NO: 777 - DNA, 50 bp, Artificial Sequence
  Synthetic
ttcatcttgggcgtgcgcttgatgtgggacaggcagatcagacagcccct

SEQ ID NO: 778 - DNA, 30 bp, Artificial Sequence
  Synthetic
gcacttgatgtgggacaggcagatcagaca

SEQ ID NO: 779 - DNA, 30 bp, Artificial Sequence
  Synthetic
gcccttgatgtgggacaggcagatcagaca

SEQ ID NO: 780 - DNA, 30 bp, Artificial Sequence
  Synthetic
gctcttgatgtgggacaggcagatcagaca

SEQ ID NO: 781 - DNA, 30 bp, Artificial Sequence
  Synthetic
gcgcttgatgtgggacaggcagatcagaca

SEQ ID NO: 782 - DNA, 51 bp, Artificial Sequence
  Synthetic
gttcatcttgggcgtgcacttgatgtgggacaggcagatcagacagcccct

SEQ ID NO: 783 - DNA, 51 bp, Artificial Sequence
  Synthetic
gttcatcttgggcgtgcccttgatgtgggacaggcagatcagacagcccct

SEQ ID NO: 784 - DNA, 51 bp, Artificial Sequence
  Synthetic
gttcatcttgggcgtgctcttgatgtgggacaggcagatcagacagcccct

SEQ ID NO: 785 - DNA, 51 bp, Artificial Sequence
  Synthetic
gttcatcttgggcgtgcgcttgatgtgggacaggcagatcagacagcccct

SEQ ID NO: 786 - DNA, 31 bp, Artificial Sequence
  Synthetic
ggcacttgatgtgggacaggcagatcagaca

SEQ ID NO: 787 - DNA, 31 bp, Artificial Sequence
  Synthetic
ggcccttgatgtgggacaggcagatcagaca

SEQ ID NO: 788 - DNA, 31 bp, Artificial Sequence
  Synthetic
ggctcttgatgtgggacaggcagatcagaca

SEQ ID NO: 789 - DNA, 31 bp, Artificial Sequence
  Synthetic
ggcgcttgatgtgggacaggcagatcagaca

SEQ ID NO: 790 - DNA, 51 bp, Artificial Sequence
  Synthetic
aggggctgtctgatctgcctgtcccacatcaagtgcacgcccaagatgaac

SEQ ID NO: 791 - DNA, 51 bp, Artificial Sequence
  Synthetic
aggggctgtctgatctgcctgtcccacatcaagggcacgcccaagatgaac

SEQ ID NO: 792 - DNA, 51 bp, Artificial Sequence
  Synthetic
aggggctgtctgatctgcctgtcccacatcaagagcacgcccaagatgaac

SEQ ID NO: 793 - DNA, 51 bp, Artificial Sequence
  Synthetic
aggggctgtctgatctgcctgtcccacatcaagcgcacgcccaagatgaac

SEQ ID NO: 794 - DNA, 31 bp, Artificial Sequence
  Synthetic
tgtctgatctgcctgtcccacatcaagtgcc

SEQ ID NO: 795 - DNA, 31 bp, Artificial Sequence
  Synthetic
tgtctgatctgcctgtcccacatcaagggcc

SEQ ID NO: 796 - DNA, 31 bp, Artificial Sequence
  Synthetic
tgtctgatctgcctgtcccacatcaagagcc

SEQ ID NO: 797 - DNA, 31 bp, Artificial Sequence
  Synthetic
tgtctgatctgcctgtcccacatcaagcgcc

SEQ ID NO: 798 - DNA, 55 bp, Artificial Sequence
  Synthetic
caccgttcatcttgggcgtgcacttgatgtgggacaggcagatcagacagcccct

SEQ ID NO: 799 - DNA, 55 bp, Artificial Sequence
  Synthetic
caccgttcatcttgggcgtgcccttgatgtgggacaggcagatcagacagcccct

SEQ ID NO: 800 - DNA, 55 bp, Artificial Sequence
  Synthetic
caccgttcatcttgggcgtgctcttgatgtgggacaggcagatcagacagcccct

SEQ ID NO: 801 - DNA, 55 bp, Artificial Sequence
  Synthetic
caccgttcatcttgggcgtgcgcttgatgtgggacaggcagatcagacagcccct

SEQ ID NO: 802 - DNA, 35 bp, Artificial Sequence
  Synthetic
caccggcacttgatgtgggacaggcagatcagaca

SEQ ID NO: 803 - DNA, 35 bp, Artificial Sequence
  Synthetic
caccggcccttgatgtgggacaggcagatcagaca

SEQ ID NO: 804 - DNA, 35 bp, Artificial Sequence
  Synthetic
caccggctcttgatgtgggacaggcagatcagaca

SEQ ID NO: 805 - DNA, 35 bp, Artificial Sequence
  Synthetic
caccggcgcttgatgtgggacaggcagatcagaca

SEQ ID NO: 806 - DNA, 55 bp, Artificial Sequence
  Synthetic
caacaggggctgtctgatctgcctgtcccacatcaagtgcacgcccaagatgaac

SEQ ID NO: 807 - DNA, 55 bp, Artificial Sequence
  Synthetic
caacaggggctgtctgatctgcctgtcccacatcaagggcacgcccaagatgaac

SEQ ID NO: 808 - DNA, 55 bp, Artificial Sequence
  Synthetic
caacaggggctgtctgatctgcctgtcccacatcaagagcacgcccaagatgaac

SEQ ID NO: 809 - DNA, 55 bp, Artificial Sequence
  Synthetic
caacaggggctgtctgatctgcctgtcccacatcaagcgcacgcccaagatgaac

SEQ ID NO: 810 - DNA, 35 bp, Artificial Sequence
  Synthetic
caactgtctgatctgcctgtcccacatcaagtgcc

SEQ ID NO: 811 - DNA, 35 bp, Artificial Sequence
  Synthetic
caactgtctgatctgcctgtcccacatcaagggcc

SEQ ID NO: 812 - DNA, 35 bp, Artificial Sequence
  Synthetic
caactgtctgatctgcctgtcccacatcaagagcc

SEQ ID NO: 813 - DNA, 35 bp, Artificial Sequence
  Synthetic
caactgtctgatctgcctgtcccacatcaagcgcc

SEQ ID NO: 814 - DNA, 55 bp, Artificial Sequence; identical to SEQ ID NO: 798
  Synthetic

SEQ ID NO: 815 - DNA, 55 bp, Artificial Sequence; identical to SEQ ID NO: 799
  Synthetic

SEQ ID NO: 816 - DNA, 55 bp, Artificial Sequence; identical to SEQ ID NO: 800
  Synthetic

SEQ ID NO: 817 - DNA, 55 bp, Artificial Sequence; identical to SEQ ID NO: 801
  Synthetic

SEQ ID NO: 818 - DNA, 35 bp, Artificial Sequence; identical to SEQ ID NO: 802
  Synthetic

SEQ ID NO: 819 - DNA, 35 bp, Artificial Sequence; identical to SEQ ID NO: 803
  Synthetic

SEQ ID NO: 820 - DNA, 35 bp, Artificial Sequence; identical to SEQ ID NO: 804
  Synthetic

SEQ ID NO: 821 - DNA, 35 bp, Artificial Sequence; identical to SEQ ID NO: 805
  Synthetic

SEQ ID NO: 822 - DNA, 55 bp, Artificial Sequence; identical to SEQ ID NO: 806
  Synthetic

SEQ ID NO: 823 - DNA, 55 bp, Artificial Sequence; identical to SEQ ID NO: 807
  Synthetic

SEQ ID NO: 824 - DNA, 55 bp, Artificial Sequence; identical to SEQ ID NO: 808
  Synthetic

SEQ ID NO: 825 - DNA, 55 bp, Artificial Sequence; identical to SEQ ID NO: 809
  Synthetic

SEQ ID NO: 826 - DNA, 35 bp, Artificial Sequence; identical to SEQ ID NO: 810
  Synthetic

SEQ ID NO: 827 - DNA, 35 bp, Artificial Sequence; identical to SEQ ID NO: 811
  Synthetic

SEQ ID NO: 828 - DNA, 35 bp, Artificial Sequence; identical to SEQ ID NO: 812
  Synthetic

SEQ ID NO: 829 - DNA, 35 bp, Artificial Sequence; identical to SEQ ID NO: 813
  Synthetic

SEQ ID NO: 830 - DNA, 30 bp, Artificial Sequence
  Synthetic
ctctttgtcgccttcgtaggtgtggcagcg

SEQ ID NO: 831 - DNA, 30 bp, Artificial Sequence
  Synthetic
gtcgccttcgtaggtgtggcagcgtcctgg

SEQ ID NO: 832 - DNA, 30 bp, Artificial Sequence
  Synthetic
ttcgtaggtgtggcagcgtcctgggatgaa

SEQ ID NO: 833 - DNA, 30 bp, Artificial Sequence
  Synthetic
ggtgtggcagcgtcctgggatgaacttctt

SEQ ID NO: 834 - DNA, 30 bp, Artificial Sequence
  Synthetic
gcagcgtcctgggatgaacttcttcatctt

SEQ ID NO: 835 - DNA, 30 bp, Artificial Sequence
  Synthetic
tcctgggatgaacttcttcatcttgggcgt

SEQ ID NO: 836 - DNA, 30 bp, Artificial Sequence
  Synthetic
gatgaacttcttcatcttgggcgtgcgctt

SEQ ID NO: 837 - DNA, 30 bp, Artificial Sequence
  Synthetic
cttcttcatcttgggcgtgcgcttgatgtg

SEQ ID NO: 838 - DNA, 30 bp, Artificial Sequence
  Synthetic
catcttgggcgtgcgcttgatgtgggacag

SEQ ID NO: 839 - DNA, 30 bp, Artificial Sequence
  Synthetic
gggcgtgcgcttgatgtgggacaggcagat

SEQ ID NO: 840 - DNA, 30 bp, Artificial Sequence; identical to SEQ ID NO: 781
  Synthetic

SEQ ID NO: 841 - DNA, 30 bp, Artificial Sequence
  Synthetic
gatgtgggacaggcagatcagacagcccct

SEQ ID NO: 842 - DNA, 30 bp, Artificial Sequence
  Synthetic
ggacaggcagatcagacagcccctggtgca

SEQ ID NO: 843 - DNA, 30 bp, Artificial Sequence
  Synthetic
gcagatcagacagcccctggtgcagccagc

SEQ ID NO: 844 - DNA, 30 bp, Artificial Sequence
  Synthetic
cagacagcccctggtgcagccagctttccg

SEQ ID NO: 845 - DNA, 30 bp, Artificial Sequence
  Synthetic
gtaatgcctggcttgtcgacgcatagtctg

SEQ ID NO: 846 - DNA, 31 bp, Artificial Sequence
  Synthetic
gctctttgtcgccttcgtaggtgtggcagcg

SEQ ID NO: 847 - DNA, 31 bp, Artificial Sequence
  Synthetic
ggtcgccttcgtaggtgtggcagcgtcctgg

SEQ ID NO: 848 - DNA, 31 bp, Artificial Sequence
  Synthetic
gttcgtaggtgtggcagcgtcctgggatgaa

SEQ ID NO: 849 - DNA, 31 bp, Artificial Sequence
  Synthetic
gggtgtggcagcgtcctgggatgaacttctt

SEQ ID NO: 850 - DNA, 31 bp, Artificial Sequence
  Synthetic
ggcagcgtcctgggatgaacttcttcatctt

SEQ ID NO: 851 - DNA, 31 bp, Artificial Sequence
  Synthetic
gtcctgggatgaacttcttcatcttgggcgt

SEQ ID NO: 852 - DNA, 31 bp, Artificial Sequence
  Synthetic
ggatgaacttcttcatcttgggcgtgcgctt

SEQ ID NO: 853 - DNA, 31 bp, Artificial Sequence
  Synthetic
gcttcttcatcttgggcgtgcgcttgatgtg

SEQ ID NO: 854 - DNA, 31 bp, Artificial Sequence
  Synthetic
gcatcttgggcgtgcgcttgatgtgggacag

SEQ ID NO: 855 - DNA, 31 bp, Artificial Sequence
  Synthetic
ggggcgtgcgcttgatgtgggacaggcagat

SEQ ID NO: 856 - DNA, 31 bp, Artificial Sequence; identical to SEQ ID NO: 789
  Synthetic

SEQ ID NO: 857 - DNA, 31 bp, Artificial Sequence
  Synthetic
ggatgtgggacaggcagatcagacagcccct

SEQ ID NO: 858 - DNA, 31 bp, Artificial Sequence
  Synthetic
gggacaggcagatcagacagcccctggtgca

SEQ ID NO: 859 - DNA, 31 bp, Artificial Sequence
  Synthetic
ggcagatcagacagcccctggtgcagccagc

SEQ ID NO: 860 - DNA, 31 bp, Artificial Sequence
  Synthetic
gcagacagcccctggtgcagccagctttccg

SEQ ID NO: 861 - DNA, 31 bp, Artificial Sequence
  Synthetic
ggtaatgcctggcttgtcgacgcatagtctg

SEQ ID NO: 862 - DNA, 31 bp, Artificial Sequence
  Synthetic
cgctgccacacctacgaaggcgacaaagagc

SEQ ID NO: 863 - DNA, 31 bp, Artificial Sequence
  Synthetic
ccaggacgctgccacacctacgaaggcgacc

SEQ ID NO: 864 - DNA, 31 bp, Artificial Sequence
  Synthetic
ttcatcccaggacgctgccacacctacgaac

SEQ ID NO: 865 - DNA, 31 bp, Artificial Sequence
  Synthetic
aagaagttcatcccaggacgctgccacaccc

SEQ ID NO: 866 - DNA, 31 bp, Artificial Sequence
  Synthetic
aagatgaagaagttcatcccaggacgctgcc

SEQ ID NO: 867 - DNA, 31 bp, Artificial Sequence
  Synthetic
acgcccaagatgaagaagttcatcccaggac

SEQ ID NO: 868 - DNA, 31 bp, Artificial Sequence
  Synthetic
aagcgcacgcccaagatgaagaagttcatcc

SEQ ID NO: 869 - DNA, 31 bp, Artificial Sequence
  Synthetic
cacatcaagcgcacgcccaagatgaagaagc

SEQ ID NO: 870 - DNA, 31 bp, Artificial Sequence
  Synthetic
ctgtcccacatcaagcgcacgcccaagatgc

SEQ ID NO: 871 - DNA, 31 bp, Artificial Sequence
  Synthetic
atctgcctgtcccacatcaagcgcacgcccc

SEQ ID NO: 872 - DNA, 31 bp, Artificial Sequence; identical to SEQ ID NO: 797
  Synthetic

SEQ ID NO: 873 - DNA, 31 bp, Artificial Sequence
  Synthetic
aggggctgtctgatctgcctgtcccacatcc

SEQ ID NO: 874 - DNA, 31 bp, Artificial Sequence
  Synthetic
tgcaccaggggctgtctgatctgcctgtccc

SEQ ID NO: 875 - DNA, 31 bp, Artificial Sequence
  Synthetic
gctggctgcaccaggggctgtctgatctgcc

SEQ ID NO: 876 - DNA, 31 bp, Artificial Sequence
  Synthetic
cggaaagctggctgcaccaggggctgtctgc

SEQ ID NO: 877 - DNA, 31 bp, Artificial Sequence
  Synthetic
cagactatgcgtcgacaagccaggcattacc

SEQ ID NO: 878 - DNA, 35 bp, Artificial Sequence
  Synthetic
caccgctctttgtcgccttcgtaggtgtggcagcg

SEQ ID NO: 879 - DNA, 35 bp, Artificial Sequence
  Synthetic
caccggtcgccttcgtaggtgtggcagcgtcctgg

SEQ ID NO: 880 - DNA, 35 bp, Artificial Sequence
  Synthetic
caccgttcgtaggtgtggcagcgtcctgggatgaa

SEQ ID NO: 881 - DNA, 35 bp, Artificial Sequence
  Synthetic
caccgggtgtggcagcgtcctgggatgaacttctt

SEQ ID NO: 882 - DNA, 35 bp, Artificial Sequence
  Synthetic
caccggcagcgtcctgggatgaacttcttcatctt

SEQ ID NO: 883 - DNA, 35 bp, Artificial Sequence
  Synthetic
caccgtcctgggatgaacttcttcatcttgggcgt

SEQ ID NO: 884 - DNA, 35 bp, Artificial Sequence
  Synthetic
caccggatgaacttcttcatcttgggcgtgcgctt

SEQ ID NO: 885 - DNA, 35 bp, Artificial Sequence
  Synthetic
caccgcttcttcatcttgggcgtgcgcttgatgtg

SEQ ID NO: 886 - DNA, 35 bp, Artificial Sequence
  Synthetic
caccgcatcttgggcgtgcgcttgatgtgggacag

SEQ ID NO: 887 - DNA, 35 bp, Artificial Sequence
  Synthetic
caccggggcgtgcgcttgatgtgggacaggcagat

SEQ ID NO: 888 - DNA, 35 bp, Artificial Sequence; identical to SEQ ID NO: 805
  Synthetic

SEQ ID NO: 889 - DNA, 35 bp, Artificial Sequence
  Synthetic
caccggatgtgggacaggcagatcagacagcccct

SEQ ID NO: 890 - DNA, 35 bp, Artificial Sequence
  Synthetic
caccgggacaggcagatcagacagcccctggtgca

SEQ ID NO: 891 - DNA, 35 bp, Artificial Sequence
  Synthetic
caccggcagatcagacagcccctggtgcagccagc

SEQ ID NO: 892 - DNA, 35 bp, Artificial Sequence
  Synthetic
caccgcagacagcccctggtgcagccagctttccg

SEQ ID NO: 893 - DNA, 35 bp, Artificial Sequence
  Synthetic
caccggtaatgcctggcttgtcgacgcatagtctg

SEQ ID NO: 894 - DNA, 35 bp, Artificial Sequence
  Synthetic
caaccgctgccacacctacgaaggcgacaaagagc

SEQ ID NO: 895 - DNA, 35 bp, Artificial Sequence
  Synthetic
caacccaggacgctgccacacctacgaaggcgacc

SEQ ID NO: 896 - DNA, 35 bp, Artificial Sequence
  Synthetic
caacttcatcccaggacgctgccacacctacgaac

SEQ ID NO: 897 - DNA, 35 bp, Artificial Sequence
  Synthetic
caacaagaagttcatcccaggacgctgccacaccc

SEQ ID NO: 898 - DNA, 35 bp, Artificial Sequence
  Synthetic
caacaagatgaagaagttcatcccaggacgctgcc

SEQ ID NO: 899 - DNA, 35 bp, Artificial Sequence
  Synthetic
caacacgcccaagatgaagaagttcatcccaggac

SEQ ID NO: 900 - DNA, 35 bp, Artificial Sequence
  Synthetic
caacaagcgcacgcccaagatgaagaagttcatcc

SEQ ID NO: 901 - DNA, 35 bp, Artificial Sequence
  Synthetic
caaccacatcaagcgcacgcccaagatgaagaagc

SEQ ID NO: 902 - DNA, 35 bp, Artificial Sequence
  Synthetic
caacctgtcccacatcaagcgcacgcccaagatgc

SEQ ID NO: 903 - DNA, 35 bp, Artificial Sequence
  Synthetic
caacatctgcctgtcccacatcaagcgcacgcccc

SEQ ID NO: 904 - DNA, 35 bp, Artificial Sequence; identical to SEQ ID NO: 813
  Synthetic

SEQ ID NO: 905 - DNA, 35 bp, Artificial Sequence
  Synthetic
caacaggggctgtctgatctgcctgtcccacatcc

SEQ ID NO: 906 - DNA, 35 bp, Artificial Sequence
  Synthetic
caactgcaccaggggctgtctgatctgcctgtccc

SEQ ID NO: 907 - DNA, 35 bp, Artificial Sequence
  Synthetic
caacgctggctgcaccaggggctgtctgatctgcc

SEQ ID NO: 908 - DNA, 35 bp, Artificial Sequence
  Synthetic
caaccggaaagctggctgcaccaggggctgtctgc

SEQ ID NO: 909 - DNA, 35 bp, Artificial Sequence
  Synthetic
caaccagactatgcgtcgacaagccaggcattacc

SEQ ID NO: 910 - RNA, 104 nt, Cypridina luciferase
uguugccgaaugugucaguauguaauugaaugcagaguagaggccgcaggauaguuuagaacauucuauggaaagagauuccaguuccaggaaccugguacaua

SEQ ID NO: 911 - RNA, 50 nt, Cypridina luciferase
cauccugcggccucuacucugcauucaauuacauacugacacauucggca

SEQ ID NO: 912 - RNA, 50 nt, Cypridina luciferase
uucuaaaccauccugcggccucuacucugcauucaauuacauacugacac

SEQ ID NO: 913 - RNA, 50 nt, Cypridina luciferase
auagaauguucuaaaccauccugcggccucuacucugcauucaauuacau

SEQ ID NO: 914 - RNA, 50 nt, Cypridina luciferase
cucuuuccauagaauguucuaaaccauccugcggccucuacucugcauuc

SEQ ID NO: 915 - RNA, 50 nt, Cypridina luciferase
acuggaaucucuuuccauagaauguucuaaaccauccugcggccucuacu

SEQ ID NO: 916 - RNA, 50 nt, Cypridina luciferase
uuccuggaacuggaaucucuuuccauagaauguucuaaaccauccugcgg

SEQ ID NO: 917 - RNA, 50 nt, Cypridina luciferase
guaccagguuccuggaacuggaaucucuuuccauagaauguucuaaacca

SEQ ID NO: 918 - DNA, 120 bp, Artificial Sequence
  Synthetic
gacacagcaggtcaagaggagtacagtgcaatgagggaccagtacatgaggactggggagggctttctttgtgtatttgccataaataatactaaatcatttgaagatattcaccattat

SEQ ID NO: 919 - protein, 16 aa, Artificial Sequence
  Synthetic
SGSETPGTSESATPES

1. An engineered composition for site directed base editing comprising a targeting domain and an adenosine deaminase, or catalytic domain thereof.

2. The composition of claim 1, wherein the targeting domain is an oligonucleotide binding domain.

3. The composition of claim 1, wherein the adenosine deaminase, or catalytic domain thereof, comprises one or more mutations that increase activity or specificity of the adenosine deaminase relative to wild type.

4. The composition of claim 1, wherein the adenosine deaminase comprises one or more mutations that changes the functionality of the adenosine deaminase relative to wild type, preferably an ability of the adenosine deaminase to deaminate cytidine.

5. The composition of claim 1, wherein the targeting domain is a CRISPR system comprising a CRISPR effector protein or a fragment thereof, which retains DNA and/or RNA binding ability, and a guide molecule.

6. The composition of claim 5, wherein the CRISPR system is catalytically inactive.

7. The composition of claim 5, wherein the CRISPR system comprises an RNA-binding protein, preferably Cas13, preferably the Cas13 protein is Cas13a, Cas13b or Cas13c, preferably wherein said Cas13 is a Cas13 listed in any of Tables 1, 2, 3, 4, or 6 or is from a bacterial species listed in any of Tables 1, 2, 3, 4, or 6, preferably wherein said Cas13 protein is Prevotella sp.P5-125 Cas13b, Porphyromas gulae Cas13b, or Riemerella anatipestifer Cas13b; preferably Prevotella sp.P5-125 Cas13b.

8. The composition of claim 5, wherein said guide molecule comprises a guide sequence capable of hybridizing with a target RNA sequence comprising an Adenine to form an RNA duplex, wherein said guide sequence comprises a non-pairing Cytosine at a position corresponding to said Adenine resulting in an A-C mismatch in the RNA duplex formed.

9. The composition of claim 7, wherein said Cas13 protein is a Cas13a protein and said Cas13a comprises one or more mutations the two HEPN domains, position R474 and R1046 of Cas13a protein originating from Leptotrichia wadei or amino acid positions corresponding thereto of a Cas13a ortholog, or wherein said Cas13 protein is a Cas13b protein and said Cas13b comprises a mutation in one or more of positions R116, H121, R1177, H1182, R116A, H121A, R1177A, H182A of Cas13b protein originating from Bergeyella zoohelcum ATCC 43767 or amino acid positions corresponding thereto of a Cas13b ortholog, or wherein said Cas13 protein is a Cas13b protein and said Cas13b comprises a mutation in one or more of positions R128, H133, R1053, H1058, preferably H133 and H1058, preferably H133A and H1058A, of a Cas13b protein originating from Prevotella sp. P5-125 or amino acid positions corresponding thereto of a Cas13b ortholog.

10. The composition of claim 7, wherein said Cas13, preferably Cas13b, is truncated, preferably C-terminally truncated, preferably wherein said Cas13 is a truncated functional variant of the corresponding wild type Cas13, optionally wherein said truncated Cas13b is encoded by nucleotides 1-984 of Prevotella sp.P5-125 Cas13b or the corresponding nucleotides of a Cas13b ortholog or homolog.

11. The composition of claim 7, wherein said Cas13 is a catalytically inactive Cas13, preferably Cas13b6.

12. The composition of claim 10, wherein said guide sequence has a length of about 20-53 nt, preferably 25-53 nt, more preferably 29-53 nt or 40-50 nt capable of forming said RNA duplex with said target sequence, and/or wherein the distance between said non-pairing C and the 5′ end of said guide sequence is 20-30 nucleotides.

13. The composition of claim 12, wherein the guide sequence comprises more than one mismatch corresponding to different adenosine sites in the target RNA sequence or wherein two guide molecules are used, each comprising a mismatch corresponding to a different adenosine site in the target RNA sequence.

14. The composition of claim 1, wherein the adenosine deaminase protein or catalytic domain thereof is fused to a N- or C-terminus of said oligonucleotide targeting protein, optionally by a linker, preferably wherein said linker is (GGGGS)₃₋₁₁, GSG₅ or LEPGEKPYKCPECGKSFSQSGALTRHQRTHTR, or wherein said linker is an XTEN linker.

15. The composition of claim 7, wherein said adenosine deaminase protein or catalytic domain thereof is inserted into an internal loop of a dead Cas13 protein.

16. The composition of claim 7, wherein said adenosine deaminase protein or catalytic domain thereof is linked to an adaptor protein and said guide molecule or said dead Cas13 protein comprises an aptamer sequence capable of binding to said adaptor protein, preferably wherein said adaptor sequence is selected from MS2, PP7, Qβ, F2, GA, fr, JP501, M12, R17, BZ13, JP34, JP500, KU1, M11, MX1, TW18, VK, SP, FI, ID2, NL95, TW19, AP205, ϕCb5, ϕCb8r, ϕCb12r, ϕCb23r, 7s and PRR1.

17. The composition of claim 1, wherein said adenosine deaminase protein or catalytic domain thereof capable of deaminating adenosine or cytidine in RNA or is an RNA specific adenosine deaminase and/or is a bacterial, human, cephalopod, or Drosophila adenosine deaminase protein or catalytic domain thereof, preferably TadA, more preferably ADAR, optionally huADAR, optionally (hu)ADAR1 or (hu)ADAR2, preferably huADAR2 or catalytic domain thereof.

18. The composition of claim 17, wherein the ADAR protein is a mutated hADAR2d comprising mutation E488Q or a mutated hADAR1d comprising mutation E1008Q.

19. The composition of claim 1, wherein said targeting domain and optionally said adenosine protein or catalytic domain thereof comprises heterologous nuclear export signal(s) (NES(s)) or nuclear localization signal(s) (NLS(s)), preferably an HIV Rev NES or MAPK NES, preferably C-terminal.

20. The composition of claim 1, wherein said target RNA sequence of interest is within a cell, preferably a eukaryotic cell, most preferably a human or non-human animal cell, or a plant cell.

21. The composition of claim 1 for use in prophylactic or therapeutic treatment, wherein said target locus of interest is within a human or animal.

22. A method of modifying an Adenine or Cytosine in a target RNA sequence of interest, comprising delivering to said target RNA, the composition according to claim 1.

23. The method of claim 22, wherein the targeting domain comprises a CRISPR effector protein, or a fragment thereof which retains DNA and/or RNA binding ability, and a guide molecule, wherein said guide molecule forms a complex with said CRISPR effector protein and directs said complex to bind said target RNA sequence of interest, wherein said guide sequence is capable of hybridizing with a target sequence comprising said Adenine or Cytosine to form an RNA duplex; wherein said adenosine deaminase protein or catalytic domain thereof deaminates said Adenine or cytosine in said RNA duplex.

24. The method of claim 22, wherein the CRISPR system comprises a Cas13.

25. The method of claim 22, wherein the CRISPR system and a coding sequence of the adenosine deaminase, or catalytic domain thereof, are delivered as one or more polynucleotide molecules, as a ribonucleoprotein complex, optionally via particles, vesicles, or one or more viral vectors.

26. The method of claim 22 is for use in the treatment or prevention of a disease caused by transcripts containing a pathogenic G→A or C→T point mutation.

27. An isolated cell comprising the composition of claim 1, or progeny of said modified cell, preferably wherein said cell comprises a hypoxanthine or a guanine in replace of said Adenine in said target RNA of interest compared to a corresponding cell not subjected to the method.

28. The cell or progeny thereof of claim 27, wherein said cell is a eukaryotic cell, preferably a human or non-human animal cell, optionally a therapeutic T cell or an antibody-producing B-cell or wherein said cell is a plant cell.

29. A non-human animal comprising said modified cell or progeny thereof of claim 27.

30. A plant comprising said modified cell or progeny thereof of claim 27.

31. A modified cell according to claim 27 for use in therapy, preferably cell therapy.
